(19) United States
(12) Patent Application Publication
(10) Pub. No.: US 2010/0267806 A1
(43) Pub. Date: Oct. 21, 2010

(54) LIPID FORMULATED COMPOSITIONS AND METHODS FOR INHIBITING EXPRESSION OF Eg5 AND VEGF GENES

(76) Inventors: David Bumcrot, Belmont, MA (US); Akin Akinc, Needham, MA (US); Dinah Wen-Yee Sah, Boston, MA (US); Tatiana Novobrantseva, Cambridge, MA (US)

Correspondence Address: ALNYLAM/FENWICK, SILICON VALLEY CENTER, 801 CALIFORNIA STREET, MOUNTAIN VIEW, CA, 94041, US

(21) Appl. No.: 12/723,471

(22) Filed: Mar. 12, 2010

Related U.S. Application Data
(60) Provisional application No. 61/159,788, filed on Mar. 12, 2009.
(60) Provisional application No. 61/231,579, filed on Aug. 5, 2009.
(60) Provisional application No. 61/285,947, filed on Dec. 11, 2009.

(51) Int. Cl. A61K 31/713; A61P 35/00; C12N 5/02

(52) U.S. Cl. 514/44 A; 435/375

(57) ABSTRACT

This invention relates to compositions containing double-stranded ribonucleic acid (dsRNA) in a lipid formulation, and methods of using the compositions to inhibit the expression of the Human kinesin family member 11 (Eg5) and Vascular Endothelial Growth Factor (VEGF), and methods of using the compositions to treat pathological processes mediated by Eg5 and VEGF expression, such as cancer.

### CROSS REFERENCE TO RELATED APPLICATIONS

[0001] This application claims the benefit of U.S. Provisional Application Ser. No. 61/159,788, filed Mar. 12, 2009; U.S. Provisional Application Ser. No. 61/231,579, filed Aug. 5, 2009, and U.S. Provisional Application Ser. No. 61/285,947, filed Dec. 11, 2009, all of which are incorporated herein by reference, in their entirety, for all purposes.

### FIELD OF THE INVENTION

[0002] This invention relates to lipid formulated compositions containing double-stranded ribonucleic acid(dsRNA), and their use in mediating RNA interference to inhibit the expression of a combination of genes, e.g., the Eg5 and Vascular Endothelial Growth Factor (VEGF) genes. The dsRNA are formulated in lipid formulation and can include a lipoprotein, e.g., apolipoprotein E. Also included in the invention is the use of the compositions to treat pathological processes mediated by Eg5 and VEGF expression, such as cancer.

### REFERENCE TO A SEQUENCE LISTING

[0003] This application includes a Sequence Listing submitted electronically as a text file named 16564US_sequencelisting.txt, created on Month, ______, 2010, with a size of ______ bytes. The sequence listing is incorporated by reference.

### BACKGROUND OF THE INVENTION

[0004] The maintenance of cell populations within an organism is governed by the cellular processes of cell division and programmed cell death. Within normal cells, the cellular events associated with the initiation and completion of each process is highly regulated. In proliferative disease such as cancer, one or both of these processes may be perturbed. For example, a cancer cell may have lost its regulation (checkpoint control) of the cell division cycle through either the overexpression of a positive regulator or the loss of a negative regulator, perhaps by mutation.

[0005] Alternatively, a cancer cell may have lost the ability to undergo programmed cell death through the overexpression of a negative regulator. Hence, there is a need to develop new chemotherapeutic drugs that will restore the processes of checkpoint control and programmed cell death to cancerous cells.

[0006] One approach to the treatment of human cancers is to target a protein that is essential for cell cycle progression. In order for the cell cycle to proceed from one phase to the next, certain prerequisite events must be completed. There are checkpoints within the cell cycle that enforce the proper order of events and phases. One such checkpoint is the spindle checkpoint that occurs during the metaphase stage of mitosis. Small molecules that target proteins with essential functions in mitosis may initiate the spindle checkpoint to arrest cells in mitosis. Of the small molecules that arrest cells in mitosis, those which display anti-tumor activity in the clinic also induce apoptosis, the morphological changes associated with programmed cell death. An effective chemotherapeutic for the treatment of cancer may thus be one which induces checkpoint control and programmed cell death. Unfortunately, there are few compounds available for controlling these processes within the cell. Most compounds known to cause mitotic arrest and apoptosis act as tubulin binding agents. These compounds alter the dynamic instability of microtubules and indirectly alter the function/structure of the mitotic spindle thereby causing mitotic arrest. Because most of these compounds specifically target the tubulin protein which is a component of all microtubules, they may also affect one or more of the numerous normal cellular processes in which microtubules have a role. Hence, there is also a need for agents that more specifically target proteins associated with proliferating cells.

[0007] Eg5 is one of several kinesin-like motor proteins that are localized to the mitotic spindle and known to be required for formation and/or function of the bipolar mitotic spindle. Recently, there was a report of a small molecule that disturbs bipolarity of the mitotic spindle (Mayer, T.

[0008] U. et al. 1999. Science 286(5441) 971-4, herein incorporated by reference). More specifically, the small molecule induced the formation of an aberrant mitotic spindle wherein a monoastral array of microtubules emanated from a central pair of centrosomes, with chromosomes attached to the distal ends of the microtubules. The small molecule was dubbed “monastrol” after the monoastral array. This monoastral array phenotype had been previously observed in mitotic cells that were immunodepleted of the Eg5 motor protein. This distinctive monoastral array phenotype facilitated identification of monastrol as a potential inhibitor of Eg5. Indeed, monastrol was further shown to inhibit the Eg5 motor-driven motility of microtubules in an in vitro assay. The Eg5 inhibitor monastrol had no apparent effect upon the related kinesin motor or upon the motor(s) responsible for golgi apparatus movement within the cell. Cells that display the monoastral array phenotype either through immunodepletion of Eg5 or monastrol inhibition of Eg5 arrest in M-phase of the cell cycle. However, the mitotic arrest induced by either immunodepletion or inhibition of Eg5 is transient (Kapoor, T. M., 2000. J Cell Biol 150(5) 975-80). Both the monoastral array phenotype and the cell cycle arrest in mitosis induced by monastrol are reversible. Cells recover to form a normal bipolar mitotic spindle, to complete mitosis and to proceed through the cell cycle and normal cell proliferation. These data suggest that an inhibitor of Eg5 which induced a transient mitotic arrest may not be effective for the treatment of cancer cell proliferation. Nonetheless, the discovery that monastrol causes mitotic arrest is intriguing and hence there is a need to further study and identify compounds which can be used to modulate the Eg5 motor protein in a manner that would be effective in the treatment of human cancers. There is also a need to explore the use of these compounds in combination with other antineoplastic agents.

[0009] VEGF (vascular endothelial growth factor, also known as vascular permeability factor, VPF) is a multifunctional cytokine that stimulates angiogenesis, epithelial cell proliferation, and endothelial cell survival. VEGF can be produced by a wide variety of tissues, and its overexpression or aberrant expression can result in a variety disorders, including cancers and retinal disorders, such as age-related macular degeneration and other angiogenic disorders.

[0010] Recently, double-stranded RNA molecules (dsRNA) have been shown to block gene expression in a highly conserved regulatory mechanism known as RNA interference (RNAi). WO 99/32619 (Fire et al.) discloses the use of a dsRNA of at least 25 nucleotides in length to inhibit the expression of genes in C. elegans. dsRNA has also been shown to degrade target RNA in other organisms, including plants (see, e.g., WO 99/53050, Waterhouse et al.; and WO 99/61631, Heifetz et al.), Drosophila (see, e.g., Yang, D., et al., Curr. Biol. (2000) 10:1191-1200), and mammals (see WO 00/44895, Limmer; and DE 101 00 586.5, Kreutzer et al.). This natural mechanism has now become the focus for the development of a new class of pharmaceutical agents for treating disorders that are caused by the aberrant or unwanted regulation of a gene.

### SUMMARY OF THE INVENTION

[0011] The invention provides compositions and methods for inhibiting the expression of human Eg5/KSP and VEGF genes in a cell using lipid formulated compositions containing dsRNA.

[0012] Compositions of the invention include a nucleic acid lipid particle having a first double-stranded ribonucleic acid (dsRNA) for inhibiting the expression of a human kinesin family member 11 (Eg5/KSP) gene in a cell and a second dsRNA for inhibiting expression of a human VEGF in a cell. The nucleic acid lipid particle has a lipid formulation having 45-65 mol % of a cationic lipid, 5 mol % to about 10 mol %, of a non-cationic lipid, 25-40 mol % of a sterol, and 0.5-5 mol % of a PEG or PEG-modified lipid. The first dsRNA targeting Eg5/KSP includes a first sense strand and a first antisense strand, and the first sense strand having a first sequence and the first antisense strand has a second sequence complementary to at least 15 contiguous nucleotides of SEQ ID NO:1311 (5′-UCGAGAAUCUAAACUAACU-3′), wherein the first sequence is complementary to the second sequence and wherein the first dsRNA is between 15 and 30 base pairs in length. The second dsRNA includes a second sense strand and a second antisense strand, the second sense strand having a third sequence and the second antisense strand having a fourth sequence complementary to at least 15 contiguous nucleotides of SEQ ID NO:1538 (5′-GCACAUAGGAGAGAUGAGCUU-3′), wherein the third sequence is complementary to the fourth sequence and wherein the second dsRNA is between 15 and 30 base pairs in length.

[0013] In one embodiment, the cationic lipid of the composition has formula A, wherein formula A is

[chemical structure]

[0014] where R1 and R2 are independently alkyl, alkenyl or alkynyl, each can be optionally substituted, and R3 and R4 are independently lower alkyl or R3 and R4 can be taken together to form an optionally substituted heterocyclic ring.

[0015] In other embodiments, the cationic lipid is XTC (2,2-Dilinoleyl-4-dimethylaminoethyl-[1,3]-dioxolane). In a related embodiment, the cationic lipid is XTC, the non-cationic lipid is DSPC, the sterol is cholesterol and the PEG lipid has PEG-DMG. In a yet related embodiment, the cationic lipid is XTC and the formulation is selected from the group consisting of:

| | |
|---|---|
| LNP05 | XTC/DSPC/Cholesterol/PEG-DMG |
| | 57.5/7.5/31.5/3.5 |
| | lipid:siRNA ~6:1 |
| LNP06 | XTC/DSPC/Cholesterol/PEG-DMG |
| | 57.5/7.5/31.5/3.5 |
| | lipid:siRNA ~11:1 |
| LNP07 | XTC/DSPC/Cholesterol/PEG-DMG |
| | 60/7.5/31/1.5, |
| | lipid:siRNA ~6:1 |
| LNP08 | XTC/DSPC/Cholesterol/PEG-DMG |
| | 60/7.5/31/1.5, |
| | lipid:siRNA ~11:1 |
| LNP09 | XTC/DSPC/Cholesterol/PEG-DMG |
| | 50/10/38.5/1.5 |
| | lipid:siRNA ~10:1 |
| LNP13 | XTC/DSPC/Cholesterol/PEG-DMG |
| | 50/10/38.5/1.5 |
| | lipid:siRNA ~33:1 |
| LNP22 | XTC/DSPC/Cholesterol/PEG-DSG |
| | 50/10/38.5/1.5 |
| | lipid:siRNA ~10 |

[0016] In another embodiment, the cationic lipid of the composition is ALNY-100 ((3aR,5s,6aS)-N,N-dimethyl-2,2-di((9Z,12Z)-octadeca-9,12-dienyl)tetrahydro-3aH-cyclopenta[d][1,3]dioxol-5-amine)). In other embodiments, the cationic lipid is ALNY-100 and the formulation includes:

| | |
|---|---|
| LNP10 | ALNY-100/DSPC/Cholesterol/PEG-DMG |
| | 50/10/38.5/1.5 |
| | lipid:siRNA ~10:1 |

[0017] In other embodiments, the cationic lipid is MC3 (((6Z,9Z,28Z,31Z)-heptatriaconta-6,9,28,31-tetraen-19-yl 4-(dimethylamino)butanoate). In a related embodiment, the cationic lipid 9s MC3 and the lipid formulation is selected from the group consisting of:

| | |
|---|---|
| LNP11 | MC3/DSPC/Cholesterol/PEG-DMG |
| | 50/10/38.5/1.5 |
| | lipid:siRNA ~10:1 |
| LNP14 | MC3/DSPC/Cholesterol/PEG-DMG |
| | 40/15/40/5 |
| | lipid:siRNA ~11 |
| LNP15 | MC3/DSPC/Cholesterol/PEG-DSG/GalNAc-PEG- |
| | DSG |
| | 50/10/35/4.5/0.5 |
| | lipid:siRNA ~11 |
| LNP16 | MC3/DSPC/Cholesterol/PEG-DMG |
| | 50/10/38.5/1.5 |
| | lipid:siRNA ~7 |
| LNP17 | MC3/DSPC/Cholesterol/PEG-DSG |
| | 50/10/38.5/1.5 |
| | lipid:siRNA ~10 |
| LNP18 | MC3/DSPC/Cholesterol/PEG-DMG |
| | 50/10/38.5/1.5 |
| | lipid:siRNA ~12 |
| LNP19 | MC3/DSPC/Cholesterol/PEG-DMG |
| | 50/10/35/5 |
| | lipid:siRNA ~8 |
| LNP20 | MC3/DSPC/Cholesterol/PEG-DPG |
| | 50/10/38.5/1.5 |
| | lipid:siRNA ~10 |

[0018] In another embodiment, the first dsRNA includes a sense strand consisting of SEQ ID NO:1534 (5′-UCGAGAAUCUAAACUAACUTT-3′) and an antisense strand consisting of SEQ ID NO:1535 (5′-AGUUAGUUUAGAUUCCUGATT-3′) and the second dsRNA includes a sense strand consisting of SEQ ID NO:1536 (5′-GCACAUAGGAGAGAUGAGCUU-3′), and an antisense strand consisting of SEQ ID NO:1537 (5′-AAGCUCAUCUCUCCUAUGUGCUG-3′). In yet another embodiment, each strand is modified as follows to include a 2′-O-methyl ribonucleotide as indicated by a lower case letter “c” or “u” and a phosphorothioate as indicated by a lower case letter “s”: the first dsRNA includes a sense strand consisting of SEQ ID NO:1240 (5′-ucGAGAAucuAAAcuAAcuTsT-3′) and an antisense strand consisting of SEQ ID NO:1241 (5′-AGUuAGUUuAGAUUCUCGATsT); the second dsRNA includes a sense strand consisting of SEQ ID NO:1242 (5′-GcAcAuAGGAGAGAuGAGCUsU-3′) and an antisense strand consisting of SEQ ID NO:1243 (5′-AAGCUcAUCUCUCCuAuGuGCusG-3′).

[0019] In other embodiments, the first and second dsRNA includes at least one modified nucleotide. In some embodiments, the modified nucleotide is chosen from the group of: a 2′-O-methyl modified nucleotide, a nucleotide having a 5′-phosphorothioate group, and a terminal nucleotide linked to a cholesteryl derivative or dodecanoic acid bisdecylamide group. In another embodiment, the modified nucleotide is chosen from the group of: a 2′-deoxy-2′-fluoro modified nucleotide, a 2′-deoxy-modified nucleotide, a locked nucleotide, an abasic nucleotide, 2′-amino-modified nucleotide, 2′-alkyl-modified nucleotide, morpholino nucleotide, a phosphoramidate, and a non-natural base having nucleotide. In yet another embodiment, the first and second dsRNA each comprise at least one 2′-O-methyl modified ribonucleotide and at least one nucleotide having a 5′-phosphorothioate group.

[0020] In some embodiments, each dsRNA is 19-23 bases in length. In another embodiment, each strand of each dsRNA is 21-23 bases in length. In yet another embodiment, each strand of the first dsRNA is 21 bases in length, the sense strand of the second dsRNA is 21 bases in length and the antisense strand of the second dsRNA is 23 bases in length. In other embodiments, the first and second dsRNA are present in an equimolar ratio. In one embodiment, the composition further has Sorafenib. In another embodiment, the composition further has a lipoprotein. In another embodiment, the composition further has apolipoprotein E (ApoE).

[0021] In another embodiment, the composition, upon contact with a cell expressing Eg5, inhibits expression of Eg5 by at least 40%. In yet another embodiment, the composition, upon contact with a cell expressing VEGF, inhibits expression of VEGF by at least 40%. In other embodiments, the administration of the composition to a cell decreases expression of Eg5 and VEGF in the cell. In a related embodiment, the composition is administered in a nM concentration. In a yet related embodiment, the administration of the composition to a cell increases monoaster formation in the cell.

[0022] In other embodiments, the administration of the composition to a mammal results in at least one effect selected from the group consisting of prevention of tumor growth, reduction in tumor growth, or prolonged survival in the mammal. In some embodiments, the effect is measured using at least one assay selected from the group consisting of determination of body weight, determination of organ weight, visual inspection, mRNA analysis, serum AFP analysis and survival monitoring.

[0023] The invention also provides methods for inhibiting the expression of Eg5/KSP and VEGF in a cell. The methods includes the steps ofadministering the composition of the invention to a cell. The invention also provides methods for preventing tumor growth, reducing tumor growth, or prolonging survival in a mammal in need of treatment for cancer. The methods include the step of administering the composition of the inventionto the mammal. In one embodiment, the mammal has liver cancer. In another embodiment, the mammal is a human with liver cancer. In some embodiments, a dose containing between 0.25 mg/kg and 4 mg/kg dsRNA is administered to the mammal. In other embodiments, the dsRNA is administered to a human at about 0.01, 0.1, 0.5, 1.0, 2.5, or 5.0 mg/kg.

[0024] In yet another embodiment, the invention provides methods for reducing tumor growth in a mammal in need of treatment for cancer. The methods include administering the composition of the invention to the mammal, the method reducing tumor growth by at least 20%. In another embodiment, the method reduces KSP expression by at least 60%.

### BRIEF DESCRIPTION OF THE FIGURES

[0025] FIG. 1 is a graph showing liver weights as a percentage of body weight following administration of SNALP-siRNAs in a Hep3B mouse model.

[0026] FIG. 2A is a graph showing the effect of PBS on body weight in a Hep3B mouse model. FIG. 2B is a graph showing the effect of a SNALP-siRNA (VEGF/KSP) on body weight in a Hep3B mouse model.

[0027] FIG. 2C is a graph showing the effect of a SNALP-siRNA (KSP/Luciferase) on body weight in a Hep3B mouse model.

[0028] FIG. 2D is a graph showing the effect of SNALP-siRNA (VEGF/Luciferase) on body weight in a Hep3B mouse model.

[0029] FIG. 3 is a graph showing the effects of SNALP-siRNAs on body weight in a Hep3B mouse model.

[0030] FIG. 4 is a graph showing the body weight in untreated control animals.

[0031] FIG. 5 is a graph showing the effects of control luciferase-SNALP siRNAs on body weight in a Hep3B mouse model.

[0032] FIG. 6 is a graph showing the effects of VSP-SNALP siRNAs on body weight in a Hep3B mouse model.

[0033] FIG. 7A is a graph showing the effects of SNALP-siRNAs on human GAPDH levels normalized to mouse GAPDH levels in a Hep3B mouse model.

[0034] FIG. 7B is a graph showing the effects of SNALP-siRNAs on serum AFP levels as measured by serum ELISA in a Hep3B mouse model.

[0035] FIG. 8 is a graph showing the effects of SNALP-siRNAs on human GAPDH levels normalized to mouse GAPDH levels in a Hep3B mouse model.

[0036] FIG. 9 is a graph showing the effects of SNALP-siRNAs on human KSP levels normalized to human GAPDH levels in a Hep3B mouse model.

[0037] FIG. 10 is a graph showing the effects of SNALP-siRNAs on human VEGF levels normalized to human GAPDH levels in a Hep3B mouse model.

[0038] FIG. 11A is a graph showing the effects of SNALP-siRNAs on mouse VEGF levels normalized to human GAPDH levels in a Hep3B mouse model.

[0039] FIG. 11B is a set of graphs showing the effects of SNALP-siRNAs on human GAPDH levels and serum AFP levels in a Hep3B mouse model.

[0040] FIG. 12A is a graph showing the effect of PBS, Luciferase, and ALN-VSP on tumor KSP measured by percentage of relative hKSP mRNA in a Hep3B mouse model.

[0041] FIG. 12B is a graph showing the effect of PBS, Luciferase, and SNALP-VSP on tumor VEGF measured by percentage of relative hVEGF mRNA in a Hep3B mouse model.

[0042] FIG. 12C is a graph showing the effect of PBS, Luciferase, and SNALP-VSP on GAPDH levels measured by percentage of relative hGAPDH mRNA in a Hep3B mouse model.

[0043] FIG. 13A is a graph showing the effect of SNALP si-RNAs on survival in mice with hepatic tumors. Treatment was started at 18 days after tumor cell seeding.

[0044] FIG. 13B is a graph showing the effect of SNALP-siRNAs on survival in mice with hepatic tumors. Treatment was started at 26 days after tumor cell seeding.

[0045] FIG. 14 is a graph showing the effects of SNALP-siRNAs on serum alpha fetoprotein (AFP) levels.

[0046] FIG. 15A is an image of H&E stained sections in tumor bearing animals (three weeks after Hep3B cell implantation) that were administered 2 mg/kg SNALP-VSP. Twenty four hours later, tumor bearing liver lobes were processed for histological analysis. Arrows indicate mono asters.

[0047] FIG. 15B is an image of H&E stained sections in tumor bearing animals (three weeks after Hep3B cell implantation) that were administered 2 mg/kg SNALP-Luc. Twenty four hours later, tumor bearing liver lobes were processed for histological analysis.

[0048] FIG. 16 is a graph illustrating the effects on survival of administration SNALP formulated siRNA and Sorafenib.

[0049] FIG. 17 is a flow chart of the in-line mixing method.

[0050] FIG. 18 are graphs illustrating the effects on KSP and VEGF expression in intrahepatic Hep3B tumors in mice following treatment with LNP-08 formulated VSP.

[0051] FIG. 19 illustrates the chemical structures of PEG-DSG and PEG-C-DSA.

[0052] FIG. 20 illustrates the structures of cationic lipids ALNY-100, MC3, and XTC.

[0053] FIG. 21 are graphs illustrating the effects on KSP and VEGF expression in intrahepatic Hep3B tumors in mice treated with SNALP-1955 (Luc), ALN-VSP02, and SNALP-T-VSP LNP11 and LNP-12 formulated VSP.

[0054] FIG. 22 is a set of graphs comparing the effects on KSP and VEGF expression in intrahepatic Hep3B tumors in mice treated with LNP08-Luc, ALN-VSP02, and LNP-08 and LNP08-C18 formulated VSP.

### DETAILED DESCRIPTION OF THE INVENTION

[0055] The invention provides compositions and methods for inhibiting the expression of the Eg5 gene and VEGF gene in a cell or mammal using the dsRNAs. The dsRNAs are packaged in a lipid nucleic acid particle. The invention also provides compositions and methods for treating pathological conditions and diseases, such as liver cancer, in a mammal caused by the expression of the Eg5 gene and VEGF genes. The dsRNA directs the sequence-specific degradation of mRNA through a process known as RNA interference (RNAi).

[0056] The following detailed description discloses how to make and use the compositions containing dsRNAs to inhibit the expression of the Eg5 gene and VEGF genes, respectively, as well as compositions and methods for treating diseases and disorders caused by the expression of these genes, such as cancer. The pharmaceutical compositions featured in the invention include a dsRNA having an antisense strand comprising a region of complementarity which is less than 30 nucleotides in length, generally 19-24 nucleotides in length, and is substantially complementary to at least part of an RNA transcript of the Eg5 gene, together with a pharmaceutically acceptable carrier. The compositions featured in the invention also include a dsRNA having an antisense strand having a region of complementarity which is less than 30 nucleotides in length, generally 19-24 nucleotides in length, and is substantially complementary to at least part of an RNA transcript of the VEGF gene.

[0057] Accordingly, certain aspects of the invention provide pharmaceutical compositions containing the Eg5 and VEGF dsRNAs and a pharmaceutically acceptable carrier, methods of using the compositions to inhibit expression of the Eg5 gene and the VEGF gene respectively, and methods of using the pharmaceutical compositions to treat diseases caused by expression of the Eg5 and VEGF genes.

[0058] I. Definitions

[0059] For convenience, the meaning of certain terms and phrases used in the specification, examples, and appended claims, are provided below. If there is an apparent discrepancy between the usage of a term in other parts of this specification and its definition provided in this section, the definition in this section shall prevail.

[0060] “G,” “C,” “A” and “U” each generally stand for a nucleotide that contains guanine, cytosine, adenine, and uracil as a base, respectively. “T” and “dT” are used interchangeably herein and refer to a deoxyribonucleotide wherein the nucleobase is thymine, e.g., deoxyribothymine. However, it will be understood that the term “ribonucleotide” or “nucleotide” can also refer to a modified nucleotide, as further detailed below, or a surrogate replacement moiety. The skilled person is well aware that guanine, cytosine, adenine, and uracil may be replaced by other moieties without substantially altering the base pairing properties of an oligonucleotide comprising a nucleotide bearing such replacement moiety. For example, without limitation, a nucleotide comprising inosine as its base may base pair with nucleotides containing adenine, cytosine, or uracil. Hence, nucleotides containing uracil, guanine, or adenine may be replaced in the nucleotide sequences of the invention by a nucleotide containing, for example, inosine. In another example, adenine and cytosine anywhere in the oligonucleotide can be replaced with guanine and uracil, respectively to form G-U Wobble base pairing with the target mRNA. Sequences comprising such replacement moieties are embodiments of the invention.

[0061] As used herein, “Eg5” refers to the human kinesin family member 11, which is also known as KIF11, Eg5, HKSP, KSP, KNSL1 or TRIPS. Eg5 sequence can be found as NCBI GeneID:3832, HGNC ID: HGNC:6388 and RefSeq ID number:NM_{—}004523. The terms “Eg5” and “KSP” and “Eg5/KSP” are used interchangeably

[0062] As used herein, “VEGF,” also known as vascular permeability factor, is an angiogenic growth factor. VEGF is a homodimeric 45 kDa glycoprotein that exists in at least three different isoforms. VEGF isoforms are expressed in endothelial cells. The VEGF gene contains 8 exons that express a 189-amino acid protein isoform. A 165-amino acid isoform lacks the residues encoded by exon 6, whereas a 121-amino acid isoform lacks the residues encoded by exons 6 and 7. VEGF145 is an isoform predicted to contain 145 amino acids and to lack exon 7. VEGF can act on endothelial cells by binding to an endothelial tyrosine kinase receptor, such as Flt-1 (VEGFR-1) or KDR/flk-1 (VEGFR-2). VEGFR-2 is expressed in endothelial cells and is involved in endothelial cell differentiation and vasculogenesis. A third receptor, VEGFR-3, has been implicated in lymphogenesis.

[0063] The various isoforms have different biologic activities and clinical implications. For example, VEGF145 induces angiogenesis and like VEGF189 (but unlike VEGF165), VEGF145 binds efficiently to the extracellular matrix by a mechanism that is not dependent on extracellular matrix-associated heparin sulfates. VEGF displays activity as an endothelial cell mitogen and chemoattractant in vitro and induces vascular permeability and angiogenesis in vivo. VEGF is secreted by a wide variety of cancer cell types and promotes the growth of tumors by inducing the development of tumor-associated vasculature. Inhibition of VEGF function has been shown to limit both the growth of primary experimental tumors as well as the incidence of metastases in immunocompromised mice. Various dsRNAs directed to VEGF are described in co-pending U.S. Ser. Nos. 11/078,073 and 11/340,080, which are hereby incorporated by reference in their entirety.

[0064] As used herein, “target sequence” refers to a contiguous portion of the nucleotide sequence of an mRNA molecule formed during the transcription of the Eg5/KSP and/or VEGF gene, including mRNA that is a product of RNA processing of a primary transcription product.

[0065] As used herein, the term “strand comprising a sequence” refers to an oligonucleotide comprising a chain of nucleotides that is described by the sequence referred to using the standard nucleotide nomenclature.

[0066] As used herein, and unless otherwise indicated, the term “complementary,” when used to describe a first nucleotide sequence in relation to a second nucleotide sequence, refers to the ability of an oligonucleotide or polynucleotide comprising the first nucleotide sequence to hybridize and form a duplex structure under certain conditions with an oligonucleotide or polynucleotide comprising the second nucleotide sequence, as will be understood by the skilled person. Such conditions can, for example, be stringent conditions, where stringent conditions may include: 400 mM NaCl, 40 mM PIPES pH 6.4, 1 mM EDTA, 50° C. or 70° C. for 12-16 hours followed by washing. Other conditions, such as physiologically relevant conditions as may be encountered inside an organism, can apply. The skilled person will be able to determine the set of conditions most appropriate for a test of complementarity of two sequences in accordance with the ultimate application of the hybridized nucleotides.

[0067] The term “complementary” includes base-pairing of the oligonucleotide or polynucleotide comprising the first nucleotide sequence to the oligonucleotide or polynucleotide comprising the second nucleotide sequence over the entire length of the first and second nucleotide sequence. Such sequences can be referred to as “fully complementary” with respect to each other herein. However, where a first sequence is referred to as “substantially complementary” with respect to a second sequence herein, the two sequences can be fully complementary, or they may form one or more, but generally not more than 4, 3 or 2 mismatched base pairs upon hybridization, while retaining the ability to hybridize under the conditions most relevant to their ultimate application. However, where two oligonucleotides are designed to form, upon hybridization, one or more single stranded overhangs, such overhangs shall not be regarded as mismatches with regard to the determination of complementarity. For example, a dsRNA comprising one oligonucleotide 21 nucleotides in length and another oligonucleotide 23 nucleotides in length, wherein the longer oligonucleotide comprises a sequence of 21 nucleotides that is fully complementary to the shorter oligonucleotide, may yet be referred to as “fully complementary” for the purposes of the invention.

[0068] “Complementary” sequences, as used herein, may also include, or be formed entirely from, non-Watson-Crick base pairs and/or base pairs formed from non-natural and modified nucleotides, in as far as the above requirements with respect to their ability to hybridize are fulfilled. Such non-Watson-Crick base pairs include, but are not limited to, G:U Wobble or Hoogstein base pairing.

[0069] The terms “complementary,” “fully complementary” and “substantially complementary” herein may be used with respect to the base matching between the sense strand and the antisense strand of a dsRNA, or between the antisense strand of a dsRNA and a target sequence, as will be understood from the context of their use.

[0070] As used herein, a polynucleotide which is “substantially complementary to at least part of a messenger RNA (mRNA) refers to a polynucleotide which is substantially complementary to a contiguous portion of the mRNA of interest (e.g., encoding Eg5/KSP and/or VEGF) including a 5′ untranslated region (UTR), an open reading frame (ORF), or a 3′ UTR. For example, a polynucleotide is complementary to at least a part of a Eg5 mRNA if the sequence is substantially complementary to a non-interrupted portion of a mRNA encoding Eg5.

[0071] The term “double-stranded RNA” or “dsRNA”, as used herein, refers to a duplex structure comprising two anti-parallel and substantially complementary, as defined above, nucleic acid strands. In general, the majority of nucleotides of each strand are ribonucleotides, but as described in detail herein, each or both strands can also include at least one non-ribonucleotide, e.g., a deoxyribonucleotide and/or a modified nucleotide. In addition, as used in this specification, “dsRNA” may include chemical modifications to ribonucleotides, including substantial modifications at multiple nucleotides and including all types of modifications disclosed herein or known in the art. Any such modifications, as used in an siRNA type molecule, are encompassed by “dsRNA” for the purposes of this specification and claims.

[0072] The two strands forming the duplex structure may be different portions of one larger RNA molecule, or they may be separate RNA molecules. Where the two strands are part of one larger molecule, and therefore are connected by an uninterrupted chain of nucleotides between the 3′ end of one strand and the 5′ end of the respective other strand forming the duplex structure, the connecting RNA chain is referred to as a “hairpin loop”. Where the two strands are connected covalently by means other than an uninterrupted chain of nucleotides between the 3′ end of one strand and the 5′ end of the respective other strand forming the duplex structure, the connecting structure is referred to as a “linker.” The RNA strands may have the same or a different number of nucleotides. The maximum number of base pairs is the number of nucleotides in the shortest strand of the dsRNA minus any overhangs that are present in the duplex. In addition to the duplex structure, a dsRNA may comprise one or more nucleotide overhangs. In general, the majority of nucleotides of each strand are ribonucleotides, but as described in detail herein, each or both strands can also include at least one non-ribonucleotide, e.g., a deoxyribonucleotide and/or a modified nucleotide. In addition, as used in this specification, “dsRNA” may include chemical modifications to ribonucleotides, including substantial modifications at multiple nucleotides and including all types of modifications disclosed herein or known in the art. Any such modifications, as used in an siRNA type molecule, are encompassed by “dsRNA” for the purposes of this specification and claims.

[0073] As used herein, a “nucleotide overhang” refers to the unpaired nucleotide or nucleotides that protrude from the duplex structure of a dsRNA when a 3′ end of one strand of the dsRNA extends beyond the 5′ end of the other strand, or vice versa. “Blunt” or “blunt end” means that there are no unpaired nucleotides at that end of the dsRNA, i.e., no nucleotide overhang. A “blunt ended” dsRNA is a dsRNA that is double-stranded over its entire length, i.e., no nucleotide overhang at either end of the molecule. In some embodiments the dsRNA can have a nucleotide overhang at one end of the duplex and a blunt end at the other end.

[0074] The term “antisense strand” refers to the strand of a dsRNA which includes a region that is substantially complementary to a target sequence. As used herein, the term “region of complementarity” refers to the region on the antisense strand that is substantially complementary to a sequence, for example a target sequence, as defined herein. Where the region of complementarity is not fully complementary to the target sequence, the mismatches may be in the internal or terminal regions of the molecule. Generally, the most tolerated mismatches are in the terminal regions, e.g., within 6, 5, 4, 3, or 2 nucleotides of the 5′ and/or 3′ terminus.

[0075] The term “sense strand,” as used herein, refers to the strand of a dsRNA that includes a region that is substantially complementary to a region of the antisense strand.

[0076] “Introducing into a cell,” when referring to a dsRNA, means facilitating uptake or absorption into the cell, as is understood by those skilled in the art. Absorption or uptake of dsRNA can occur through unaided diffusive or active cellular processes, or by auxiliary agents or devices. The meaning of this term is not limited to cells in vitro. A dsRNA may also be “introduced into a cell”, wherein the cell is part of a living organism. In such instance, introduction into the cell will include the delivery to the organism. For example, for in vivo delivery, dsRNA can be injected into a tissue site or administered systemically. In vitro introduction into a cell includes methods known in the art such as electroporation and lipofection.

[0077] The terms “silence” and “inhibit the expression of “down-regulate the expression of,” “suppress the expression of and the like, in as far as they refer to the Eg5 and/or VEGF gene, herein refer to the at least partial suppression of the expression of the Eg5 gene, as manifested by a reduction of the amount of Eg5 mRNA and/or VEGF mRNA which may be isolated from a first cell or group of cells in which the Eg5 and/or VEGF gene is transcribed and which has or have been treated such that the expression of the Eg5 and/or VEGF gene is inhibited, as compared to a second cell or group of cells substantially identical to the first cell or group of cells but which has or have not been so treated (control cells). The degree of inhibition is usually expressed in terms of

$$\frac{( mRNA in control cells ) - ( mRNA in treated cells )}{( mRNA in control cells )} \cdot 100 \%$$

[0078] Alternatively, the degree of inhibition may be given in terms of a reduction of a parameter that is functionally linked to Eg5 and/or VEGF gene expression, e.g. the amount of protein encoded by the Eg5 and/or VEGF gene which is produced by a cell, or the number of cells displaying a certain phenotype, e.g. apoptosis. In principle, target gene silencing can be determined in any cell expressing the target, either constitutively or by genomic engineering, and by any appropriate assay. However, when a reference is needed in order to determine whether a given dsRNA inhibits the expression of the Eg5 gene by a certain degree and therefore is encompassed by the instant invention, the assay provided in the Examples below shall serve as such reference.

[0079] For example, in certain instances, expression of the Eg5 gene (or VEGF gene) is suppressed by at least about 5%, 10%, 15%, 20%, 25%, 30%, 35%, 40%, 45%, or 50% by administration of the double-stranded oligonucleotide of the invention. In some embodiments, the Eg5 and/or VEGF gene is suppressed by at least about 60%, 70%, or 80% by administration of the double-stranded oligonucleotide of the invention. In other embodiments, the Eg5 and/or VEGF gene is suppressed by at least about 85%, 90%, or 95% by administration of the double-stranded oligonucleotide of the invention. The Tables and Example below provides values for inhibition of expression using various Eg5 and/or VEGF dsRNA molecules at various concentrations.

[0080] As used herein in the context of Eg5 expression (or VEGF expression), the terms “treat,” “treatment,” and the like, refer to relief from or alleviation of pathological processes mediated by Eg5 and/or VEGF expression. In the context of the present invention, insofar as it relates to any of the other conditions recited herein below (other than pathological processes mediated by Eg5 and/or VEGF expression), the terms “treat,” “treatment,” and the like mean to relieve or alleviate at least one symptom associated with such condition, or to slow or reverse the progression of such condition, such as the slowing and progression of hepatic carcinoma.

[0081] As used herein, the phrases “therapeutically effective amount” and “prophylactically effective amount” refer to an amount that provides a therapeutic benefit in the treatment, prevention, or management of pathological processes mediated by Eg5 and/or VEGF expression or an overt symptom of pathological processes mediated by Eg5 and/or VEGF expression. The specific amount that is therapeutically effective can be readily determined by ordinary medical practitioner, and may vary depending on factors known in the art, such as, e.g., the type of pathological processes mediated by Eg5 and/or VEGF expression, the patient's history and age, the stage of pathological processes mediated by Eg5 and/or VEGF expression, and the administration of other anti-pathological processes mediated by Eg5 and/or VEGF expression agents.

[0082] As used herein, a “pharmaceutical composition” comprises a pharmacologically effective amount of a dsRNA and a pharmaceutically acceptable carrier. As used herein, “pharmacologically effective amount,” “therapeutically effective amount” or simply “effective amount” refers to that amount of an RNA effective to produce the intended pharmacological, therapeutic or preventive result. For example, if a given clinical treatment is considered effective when there is at least a 25% reduction in a measurable parameter associated with a disease or disorder, a therapeutically effective amount of a drug for the treatment of that disease or disorder is the amount necessary to effect at least a 25% reduction in that parameter.

[0083] The term “pharmaceutically acceptable carrier” refers to a carrier for administration of a therapeutic agent. As described in more detail below, such carriers include, but are not limited to, saline, buffered saline, dextrose, water, glycerol, ethanol, and combinations thereof. The term specifically excludes cell culture medium. For drugs administered orally, pharmaceutically acceptable carriers include, but are not limited to, pharmaceutically acceptable excipients, such as inert diluents, disintegrating agents, binding agents, lubricating agents, sweetening agents, flavoring agents, coloring agents and preservatives. Suitable inert diluents include sodium and calcium carbonate, sodium and calcium phosphate, and lactose, while corn starch and alginic acid are suitable disintegrating agents. Binding agents may include starch and gelatin, while the lubricating agent, if present, will generally be magnesium stearate, stearic acid or talc. If desired, the tablets may be coated with a material such as glyceryl monostearate or glyceryl distearate, to delay absorption in the gastrointestinal tract.

[0084] As used herein, a “transformed cell” is a cell into which a vector has been introduced from which a dsRNA molecule may be expressed.

[0085] II. Double-Stranded Ribonucleic Acid (dsRNA)

[0086] As described in more detail herein, the invention provides double-stranded ribonucleic acid (dsRNA) molecules for inhibiting the expression of the Eg5 and/or VEGF gene in a cell or mammal, wherein the dsRNA comprises an antisense strand comprising a region of complementarity which is complementary to at least a part of an mRNA formed in the expression of the Eg5 and/or VEGF gene, and wherein the region of complementarity is less than 30 nucleotides in length, generally 19-24 nucleotides in length, and wherein said dsRNA, upon contact with a cell expressing said Eg5 and/or VEGF gene, inhibits the expression of said Eg5 and/or VEGF gene. The dsRNA of the invention can further include one or more single-stranded nucleotide overhangs.

[0087] The dsRNA can be synthesized by standard methods known in the art as further discussed below, e.g., by use of an automated DNA synthesizer, such as are commercially available from, for example, Biosearch, Applied Biosystems, Inc. The dsRNA comprises two strands that are sufficiently complementary to hybridize to form a duplex structure. One strand of the dsRNA (the antisense strand) comprises a region of complementarity that is substantially complementary, and generally fully complementary, to a target sequence, derived from the sequence of an mRNA formed during the expression of the Eg5 and/or VEGF gene, the other strand (the sense strand) comprises a region which is complementary to the antisense strand, such that the two strands hybridize and form a duplex structure when combined under suitable conditions. Generally, the duplex structure is between 15 and 30, or between 25 and 30, or between 18 and 25, or between 19 and 24, or between 19 and 21, or 19, 20, or 21 base pairs in length. In one embodiment the duplex is 19 base pairs in length. In another embodiment the duplex is 21 base pairs in length. When two different siRNAs are used in combination, the duplex lengths can be identical or can differ.

[0088] Each strand of the dsRNA of invention is generally between 15 and 30, or between 18 and 25, or 18, 19, 20, 21, 22, 23, or 24 nucleotides in length. In other embodiments, each is strand is 25-30 base pairs in length. Each strand of the duplex can be the same length or of different lengths. When two different siRNAs are used in combination, the lengths of each strand of each siRNA can be identical or can differ. For example, a composition can include a dsRNA targeted to Eg5 with a sense strand of 21 nucleotides and an antisense strand of 21 nucleotides, and a second dsRNA targeted to VEGF with a sense strand of 21 nucleotides and an antisense strand of 23 nucleotides.

[0089] The dsRNA of the invention can include one or more single-stranded overhang(s) of one or more nucleotides. In one embodiment, at least one end of the dsRNA has a single-stranded nucleotide overhang of 1 to 4, generally 1 or 2 nucleotides. In another embodiment, the antisense strand of the dsRNA has 1-10 nucleotides overhangs each at the 3′ end and the 5′ end over the sense strand. In further embodiments, the sense strand of the dsRNA has 1-10 nucleotides overhangs each at the 3′ end and the 5′ end over the antisense strand.

[0090] A dsRNA having at least one nucleotide overhang can have unexpectedly superior inhibitory properties than the blunt-ended counterpart. In some embodiments the presence of only one nucleotide overhang strengthens the interference activity of the dsRNA, without affecting its overall stability. A dsRNA having only one overhang has proven particularly stable and effective in vivo, as well as in a variety of cells, cell culture mediums, blood, and serum. Generally, the single-stranded overhang is located at the 3′ terminal end of the antisense strand or, alternatively, at the 3′ terminal end of the sense strand. The dsRNA can also have a blunt end, generally located at the 5′ end of the antisense strand. Such dsRNAs can have improved stability and inhibitory activity, thus allowing administration at low dosages, i.e., less than 5 mg/kg body weight of the recipient per day. Generally, the antisense strand of the dsRNA has a nucleotide overhang at the 3′ end, and the 5′ end is blunt. In another embodiment, one or more of the nucleotides in the overhang is replaced with a nucleoside thiophosphate.

[0091] As described in more detail herein, the composition of the invention includes a first dsRNA targeting Eg5 and a second dsRNA targeting VEGF. The first and second dsRNA can have the same overhang architecture, e.g., number of nucleotide overhangs on each strand, or each dsRNA can have a different architecture. In one embodiment, the first dsRNA targeting Eg5 includes a 2 nucleotide overhang at the 3′ end of each strand and the second dsRNA targeting VEGF includes a 2 nucleotide overhang on the 3′ end of the antisense strand and a blunt end at the 5′ end of the antisense strand (e.g., the 3′ end of the sense strand).

[0092] In one embodiment, the Eg5 gene targeted by the dsRNA of the invention is the human Eg5 gene. In one embodiment, the antisense strand of the dsRNA targeting Eg5 comprises at least 15 contiguous nucleotides of one of the antisense sequences of Tables 1-3. In specific embodiments, the first sequence of the dsRNA is selected from one of the sense strands of Tables 1-3, and the second sequence is selected from the group consisting of the antisense sequences of Tables 1-3. Alternative antisense agents that target elsewhere in the target sequence provided in Tables 1-3 can readily be determined using the target sequence and the flanking Eg5 sequence. In some embodiments, the dsRNA targeted to Eg5 will comprise at least two nucleotide sequence selected from the groups of sequences provided in Tables 1-3. One of the two sequences is complementary to the other of the two sequences, with one of the sequences being substantially complementary to a sequence of an mRNA generated in the expression of the Eg5 gene. As such, the dsRNA will comprises two oligonucleotides, wherein one oligonucleotide is described as the sense strand in Tables 1-3, and the second oligonucleotide is described as the antisense strand in Tables 1-3.

[0093] In embodiments using a second dsRNA targeting VEGF, such agents are exemplified in the Examples, Tables 4a and 4b, and in co-pending U.S. Ser. Nos. 11/078,073 and 11/340,080, herein incorporated by reference. In one embodiment the dsRNA targeting VEGF has an antisense strand complementary to at least 15 contiguous nucleotides of the VEGF target sequences described in Table 4a. In other embodiments, the dsRNA targeting VEGF comprises one of the antisense sequences of Table 4b, or one of the sense sequences of Table 4b, or comprises one of the duplexes (sense and antisense strands) of Table 4b.

[0094] The skilled person is well aware that dsRNAs comprising a duplex structure of between 20 and 23, but specifically 21, base pairs have been hailed as particularly effective in inducing RNA interference (Elbashir et al., EMBO 2001, 20:6877-6888). However, others have found that shorter or longer dsRNAs can be effective as well. In the embodiments described above, by virtue of the nature of the oligonucleotide sequences provided in Tables 1-3, the dsRNAs of the invention can comprise at least one strand of a length of minimally 21 nt. It can be reasonably expected that shorter dsRNAs comprising one of the sequences of Tables 1-3 minus only a few nucleotides on one or both ends may be similarly effective as compared to the dsRNAs described above. Hence, dsRNAs comprising a partial sequence of at least 15, 16, 17, 18, 19, 20, or more contiguous nucleotides from one of the sequences of Tables 1-3, and differing in their ability to inhibit the expression of the Eg5 gene in a FACS assay as described herein below by not more than 5, 10, 15, 20, 25, or 30% inhibition from a dsRNA comprising the full sequence, are contemplated by the invention. Further dsRNAs that cleave within the target sequence provided in Tables 1-3 can readily be made using the Eg5 sequence and the target sequence provided. Additional dsRNA targeting VEGF can be designed in a similar matter using the sequences disclosed in Tables 4a and 4b, the Examples and co-pending U.S. Ser. Nos. 11/078,073 and 11/340,080, herein incorporated by reference.

[0095] In addition, the RNAi agents provided in Tables 1-3 identify a site in the Eg5 mRNA that is susceptible to RNAi based cleavage. As such the present invention further includes RNAi agents, e.g., dsRNA, that target within the sequence targeted by one of the agents of the present invention. As used herein a second RNAi agent is said to target within the sequence of a first RNAi agent if the second RNAi agent cleaves the message anywhere within the mRNA that is complementary to the antisense strand of the first RNAi agent. Such a second agent will generally consist of at least 15 contiguous nucleotides from one of the sequences provided in Tables 1-3 coupled to additional nucleotide sequences taken from the region contiguous to the selected sequence in the Eg5 gene. For example, the last 15 nucleotides of SEQ ID NO:1 combined with the next 6 nucleotides from the target Eg5 gene produces a single strand agent of 21 nucleotides that is based on one of the sequences provided in Tables 1-3. Additional RNAi agents, e.g., dsRNA, targeting VEGF can be designed in a similar matter using the sequences disclosed in Tables 4a and 4b, the Examples and co-pending U.S. Ser. Nos. 11/078,073 and 11/340,080, herein incorporated by reference.

[0096] The dsRNA of the invention can contain one or more mismatches to the target sequence. In a preferred embodiment, the dsRNA of the invention contains no more than 3 mismatches. If the antisense strand of the dsRNA contains mismatches to a target sequence, it is preferable that the area of mismatch not be located in the center of the region of complementarity. If the antisense strand of the dsRNA contains mismatches to the target sequence, it is preferable that the mismatch be restricted to 5 nucleotides from either end, for example 5, 4, 3, 2, or 1 nucleotide from either the 5′ or 3′ end of the region of complementarity. For example, for a 23 nucleotide dsRNA strand which is complementary to a region of the Eg5 gene, the dsRNA generally does not contain any mismatch within the central 13 nucleotides. The methods described within the invention can be used to determine whether a dsRNA containing a mismatch to a target sequence is effective in inhibiting the expression of the Eg5 gene. Consideration of the efficacy of dsRNAs with mismatches in inhibiting expression of the Eg5 gene is important, especially if the particular region of complementarity in the Eg5 gene is known to have polymorphic sequence variation within the population.

[0097] Modifications

[0098] In yet another embodiment, the dsRNA is chemically modified to enhance stability. The nucleic acids of the invention may be synthesized and/or modified by methods well established in the art, such as those described in “Current protocols in nucleic acid chemistry,” Beaucage, S. L. et al. (Edrs.), John Wiley & Sons, Inc., New York, N.Y., USA, which is hereby incorporated herein by reference. Specific examples of preferred dsRNA compounds useful in this invention include dsRNAs containing modified backbones or no natural internucleoside linkages. As defined in this specification, dsRNAs having modified backbones include those that retain a phosphorus atom in the backbone and those that do not have a phosphorus atom in the backbone. For the purposes of this specification, and as sometimes referenced in the art, modified dsRNAs that do not have a phosphorus atom in their internucleoside backbone can also be considered to be oligonucleosides.

[0099] Preferred modified dsRNA backbones include, for example, phosphorothioates, chiral phosphorothioates, phosphorodithioates, phosphotriesters, aminoalkylphosphotriesters, methyl and other alkyl phosphonates including 3′-alkylene phosphonates and chiral phosphonates, phosphinates, phosphoramidates including 3′-amino phosphoramidate and aminoalkylphosphoramidates, thionophosphoramidates, thionoalkylphosphonates, thionoalkylphosphotriesters, and boranophosphates having normal 3′-5′ linkages, 2′-5′ linked analogs of these, and those having inverted polarity wherein the adjacent pairs of nucleoside units are linked 3′-5′ to 5′-3′ or 2′-5′ to 5′-2′. Various salts, mixed salts and free acid forms are also included.

[0100] Representative U.S. patents that teach the preparation of the above phosphorus-containing linkages include, but are not limited to, U.S. Pat. Nos. 3,687,808; 4,469,863; 4,476,301; 5,023,243; 5,177,195; 5,188,897; 5,264,423; 5,276,019; 5,278,302; 5,286,717; 5,321,131; 5,399,676; 5,405,939; 5,453,496; 5,455,233; 5,466,677; 5,476,925; 5,519,126; 5,536,821; 5,541,316; 5,550,111; 5,563,253; 5,571,799; 5,587,361; and 5,625,050, each of which is herein incorporated by reference

[0101] Preferred modified dsRNA backbones that do not include a phosphorus atom therein have backbones that are formed by short chain alkyl or cycloalkyl internucleoside linkages, mixed heteroatoms and alkyl or cycloalkyl internucleoside linkages, or ore or more short chain heteroatomic or heterocyclic internucleoside linkages. These include those having morpholino linkages (formed in part from the sugar portion of a nucleoside); siloxane backbones; sulfide, sulfoxide and sulfone backbones; formacetyl and thioformacetyl backbones; methylene formacetyl and thioformacetyl backbones; alkene containing backbones; sulfamate backbones; methyleneimino and methylenehydrazino backbones; sulfonate and sulfonamide backbones; amide backbones; and others having mixed N, O, S and CH2 component parts. Representative U.S. patents that teach the preparation of the above oligonucleosides include, but are not limited to, U.S. Pat. Nos. 5,034,506; 5,166,315; 5,185,444; 5,214,134; 5,216,141; 5,235,033; 5,64,562; 5,264,564; 5,405,938; 5,434,257; 5,466,677; 5,470,967; 5,489,677; 5,541,307; 5,561,225; 5,596,086; 5,602,240; 5,608,046; 5,610,289; 5,618,704; 5,623,070; 5,663,312; 5,633,360; 5,677,437; and, 5,677,439, each of which is herein incorporated by reference.

[0102] In other preferred dsRNA mimetics, both the sugar and the internucleoside linkage, i.e., the backbone, of the nucleotide units are replaced with novel groups. The base units are maintained for hybridization with an appropriate nucleic acid target compound. One such oligomeric compound, a dsRNA mimetic that has been shown to have excellent hybridization properties, is referred to as a peptide nucleic acid (PNA). In PNA compounds, the sugar backbone of a dsRNA is replaced with an amide containing backbone, in particular an aminoethylglycine backbone. The nucleobases are retained and are bound directly or indirectly to aza nitrogen atoms of the amide portion of the backbone. Representative U.S. patents that teach the preparation of PNA compounds include, but are not limited to, U.S. Pat. Nos. 5,539,082; 5,714,331; and 5,719,262, each of which is herein incorporated by reference. Further teaching of PNA compounds can be found in Nielsen et al., Science, 1991, 254, 1497-1500.

[0103] Most preferred embodiments of the invention are dsRNAs with phosphorothioate backbones and oligonucleosides with heteroatom backbones, and in particular —CH₂—NH—CH₂—, —CH₂—N(CH₃)—O—CH₂— [known as a methylene (methylimino) or MMI backbone], —CH₂—O—N(CH₃)—CH₂—, —CH₂N(CH₃)—N(CH₃)—CH₂— and —N(CH₃)—CH₂—CH₂' [wherein the native phosphodiester backbone is represented as —O—P—O—CH₂—] of the above-referenced U.S. Pat. No. 5,489,677, and the amide backbones of the above-referenced U.S. Pat. No. 5,602,240. Also preferred are dsRNAs having morpholino backbone structures of the above-referenced U.S. Pat. No. 5,034,506.

[0104] Modified dsRNAs may also contain one or more substituted sugar moieties. Preferred dsRNAs comprise one of the following at the 2′ position: OH; F; O-, S-, or N-alkyl; O-, S-, or N-alkenyl; O-, S- or N-alkynyl; or O-alkyl-O-alkyl, wherein the alkyl, alkenyl and alkynyl may be substituted or unsubstituted C₁ to C₁₀ alkyl or C₂ to C₁₀ alkenyl and alkynyl. Particularly preferred are O[(CH₂)ₙO]ₘCH₃, O(CH₂)ₙOCH₃, O(CH₂)ₙNH₂, O(CH₂)ₙCH₃, O(CH₂)ₙONH₂, and O(CH₂)ₙON[(CH₂)ₙCH₃)]₂, where n and m are from 1 to about 10. Other preferred dsRNAs comprise one of the following at the 2′ position: C₁ to C₁₀ lower alkyl, substituted lower alkyl, alkaryl, aralkyl, O-alkaryl or O-aralkyl, SH, SCH₃, OCN, Cl, Br, CN, CF₃, OCF₃, SOCH₃, SO₂CH₃, ONO₂, NO₂, N₃, NH₂, heterocycloalkyl, heterocycloalkaryl, aminoalkylamino, polyalkylamino, substituted silyl, an RNA cleaving group, a reporter group, an intercalator, a group for improving the pharmacokinetic properties of an dsRNA, or a group for improving the pharmacodynamic properties of an dsRNA, and other substituents having similar properties. A preferred modification includes 2′-methoxyethoxy (2′-O—CH₂CH₂OCH₃, also known as 2′-O-(2-methoxyethyl) or 2′-MOE) (Martin et al., Hely. Chim. Acta, 1995, 78, 486-504) i.e., an alkoxy-alkoxy group. A further preferred modification includes 2′-dimethylaminooxyethoxy, i.e., a O(CH₂)₂ON(CH₃)₂ group, also known as 2′-DMAOE, as described in examples herein below, and 2′-dimethylaminoethoxyethoxy (also known in the art as 2′-O-dimethylaminoethoxyethyl or 2′-DMAEOE), i.e., 2′-O—CH₂—O—CH₂—N(CH₂)₂, also described in examples herein below.

[0105] Other preferred modifications include 2′-methoxy (2′-OCH₃), 2′-aminopropoxy (2′-OCH₂CH₂CH₂NH₂) and 2′-fluoro (2′-F). Similar modifications may also be made at other positions on the dsRNA, particularly the 3′ position of the sugar on the 3′ terminal nucleotide or in 2′-5′ linked dsRNAs and the 5′ position of 5′ terminal nucleotide. dsRNAs may also have sugar mimetics such as cyclobutyl moieties in place of the pentofuranosyl sugar. Representative U.S. patents that teach the preparation of such modified sugar structures include, but are not limited to, U.S. Pat. Nos. 4,981,957; 5,118,800; 5,319,080; 5,359,044; 5,393,878; 5,446,137; 5,466,786; 5,514,785; 5,519,134; 5,567,811; 5,576,427; 5,591,722; 5,597,909; 5,610,300; 5,627,053; 5,639,873; 5,646,265; 5,658,873; 5,670,633; and 5,700,920, certain of which are commonly owned with the instant application, and each of which is herein incorporated by reference in its entirety.

[0106] dsRNAs may also include nucleobase (often referred to in the art simply as “base”) modifications or substitutions. As used herein, “unmodified” or “natural” nucleobases include the purine bases adenine (A) and guanine (G), and the pyrimidine bases thymine (T), cytosine (C) and uracil (U). Modified nucleobases include other synthetic and natural nucleobases such as 5-methylcytosine (5-me-C), 5-hydroxymethyl cytosine, xanthine, hypoxanthine, 2-aminoadenine, 6-methyl and other alkyl derivatives of adenine and guanine, 2-propyl and other alkyl derivatives of adenine and guanine, 2-thiouracil, 2-thiothymine and 2-thiocytosine, 5-halouracil and cytosine, 5-propynyl uracil and cytosine, 6-azo uracil, cytosine and thymine, 5-uracil (pseudouracil), 4-thiouracil, 8-halo, 8-amino, 8-thiol, 8-thioalkyl, 8-hydroxyl anal other 8-substituted adenines and guanines, 5-halo, particularly 5-bromo, 5-trifluoromethyl and other 5-substituted uracils and cytosine's, 7-methylguanine and 7-methyladenine, 8-azaguanine and 8-azaadenine, 7-deazaguanine and 7-daazaadenine and 3-deazaguanine and 3-deazaadenine. Further nucleobases include those disclosed in U.S. Pat. No. 3,687,808, those disclosed in The Concise Encyclopedia Of Polymer Science And Engineering, pages 858-859, Kroschwitz, J. L, ed. John Wiley & Sons, 1990, those disclosed by Englisch et al., Angewandte Chemie, International Edition, 1991, 30, 613, and those disclosed by Sanghvi, Y S., Chapter 15, DsRNA Research and Applications, pages 289-302, Crooke, S. T. and Lebleu, B., Ed., CRC Press, 1993. Certain of these nucleobases are particularly useful for increasing the binding affinity of the oligomeric compounds of the invention. These include 5-substituted pyrimidines, 6-azapyrimidines and N-2, N-6 and 0-6 substituted purines, including 2-aminopropyladenine, 5-propynyluracil and 5-propynylcytosine. 5-methylcytosine substitutions have been shown to increase nucleic acid duplex stability by 0.6-1.2 degrees Celcius. (Sanghvi, Y. S., Crooke, S. T. and Lebleu, B., Eds., DsRNA Research and Applications, CRC Press, Boca Raton, 1993, pp. 276-278) and are presently preferred base substitutions, even more particularly when combined with 2′-O-methoxyethyl sugar modifications.

[0107] Representative U.S. patents that teach the preparation of certain of the above noted modified nucleobases as well as other modified nucleobases include, but are not limited to, the above noted U.S. Pat. No. 3,687,808, as well as U.S. Pat. Nos. 4,845,205; 5,130,30; 5,134,066; 5,175,273; 5,367,066; 5,432,272; 5,457,187; 5,459,255; 5,484,908; 5,502,177; 5,525,711; 5,552,540; 5,587,469; 5,594,121, 5,596,091; 5,614,617; and 5,681,941, each of which is herein incorporated by reference, and U.S. Pat. No. 5,750,692, also herein incorporated by reference.

[0108] Conjugates

[0109] Another modification of the dsRNAs of the invention involves chemically linking to the dsRNA one or more moieties or conjugates which enhance the activity, cellular distribution or cellular uptake of the dsRNA. Such moieties include but are not limited to lipid moieties such as a cholesterol moiety (Letsinger et al., Proc. Natl. Acid. Sci. USA, 199, 86, 6553-6556), cholic acid (Manoharan et al., Biorg. Med. Chem. Let., 1994 4 1053-1060), a thioether, e.g., beryl-S-tritylthiol (Manoharan et al., Ann. N.Y. Acad. Sci., 1992, 660, 306-309; Manoharan et al., Biorg. Med. Chem. Let., 1993, 3, 2765-2770), a thiocholesterol (Oberhauser et al., Nucl. Acids Res., 1992, 20, 533-538), an aliphatic chain, e.g., dodecandiol or undecyl residues (Saison-Behmoaras et al., EMBO J, 1991, 10, 1111-1118; Kabanov et al., FEBS Lett., 1990, 259, 327-330; Svinarchuk et al., Biochimie, 1993, 75, 49-54), a phospholipid, e.g., di-hexadecyl-rac-glycerol or triethyl-ammonium 1,2-di-O-hexadecyl-rac-glycero-3-Hphosphonate (Manoharan et al., Tetrahedron Lett., 1995, 36, 3651-3654; Shea et al., Nucl. Acids Res., 1990, 18, 3777-3783), a polyamine or a polyethylene glycol chain (Manoharan et al., Nucleosides & Nucleotides, 1995, 14, 969-973), or adamantane acetic acid (Manoharan et al., Tetrahedron Lett., 1995, 36, 3651-3654), a palmityl moiety (Mishra et al., Biochim. Biophys. Acta, 1995, 1264, 229-237), or an octadecylamine or hexylamino-carbonyloxycholesterol moiety (Crooke et al., J. Pharmacol. Exp. Ther., 1996, 277, 923-937).

[0110] Representative U.S. patents that teach the preparation of such dsRNA conjugates include, but are not limited to, U.S. Pat. Nos. 4,828,979; 4,948,882; 5,218,105; 5,525,465; 5,541,313; 5,545,730; 5,552,538; 5,578,717, 5,580,731; 5,591,584; 5,109,124; 5,118,802; 5,138,045; 5,414,077; 5,486,603; 5,512,439; 5,578,718; 5,608,046; 4,587,044; 4,605,735; 4,667,025; 4,762,779; 4,789,737; 4,824,941; 4,835,263; 4,876,335; 4,904,582; 4,958,013; 5,082,830; 5,112,963; 5,214,136; 5,082,830; 5,112,963; 5,214,136; 5,245,022; 5,254,469; 5,258,506; 5,262,536; 5,272,250; 5,292,873; 5,317,098; 5,371,241, 5,391,723; 5,416,203, 5,451,463; 5,510,475; 5,512,667; 5,514,785; 5,565,552; 5,567,810; 5,574,142; 5,585,481; 5,587,371; 5,595,726; 5,597,696; 5,599,923; 5,599,928 and 5,688,941, each of which is herein incorporated by reference.

[0111] It is not necessary for all positions in a given compound to be uniformly modified, and in fact more than one of the aforementioned modifications may be incorporated in a single compound or even at a single nucleoside within a dsRNA. The present invention also includes dsRNA compounds which are chimeric compounds. “Chimeric” dsRNA compounds or “chimeras,” in the context of this invention, are dsRNA compounds, particularly dsRNAs, which contain two or more chemically distinct regions, each made up of at least one monomer unit, i.e., a nucleotide in the case of an dsRNA compound. These dsRNAs typically contain at least one region wherein the dsRNA is modified so as to confer upon the dsRNA increased resistance to nuclease degradation, increased cellular uptake, and/or increased binding affinity for the target nucleic acid. An additional region of the dsRNA may serve as a substrate for enzymes capable of cleaving RNA:DNA or RNA:RNA hybrids. By way of example, RNase H is a cellular endonuclease which cleaves the RNA strand of an RNA:DNA duplex. Activation of RNase H, therefore, results in cleavage of the RNA target, thereby greatly enhancing the efficiency of dsRNA inhibition of gene expression. Consequently, comparable results can often be obtained with shorter dsRNAs when chimeric dsRNAs are used, compared to phosphorothioate deoxy dsRNAs hybridizing to the same target region. Cleavage of the RNA target can be routinely detected by gel electrophoresis and, if necessary, associated nucleic acid hybridization techniques known in the art.

[0112] In certain instances, the dsRNA may be modified by a non-ligand group. A number of non-ligand molecules have been conjugated to dsRNAs in order to enhance the activity, cellular distribution or cellular uptake of the dsRNA, and procedures for performing such conjugations are available in the scientific literature. Such non-ligand moieties have included lipid moieties, such as cholesterol (Letsinger et al., Proc. Natl. Acad. Sci. USA, 1989, 86:6553), cholic acid (Manoharan et al., Bioorg. Med. Chem. Lett., 1994, 4:1053), a thioether, e.g., hexyl-S-tritylthiol (Manoharan et al., Ann. N.Y. Acad. Sci., 1992, 660:306; Manoharan et al., Bioorg. Med. Chem. Let., 1993, 3:2765), a thiocholesterol (Oberhauser et al., Nucl. Acids Res., 1992, 20:533), an aliphatic chain, e.g., dodecandiol or undecyl residues (Saison-Behmoaras et al., EMBO J., 1991, 10:111; Kabanov et al., FEBS Lett., 1990, 259:327; Svinarchuk et al., Biochimie, 1993, 75:49), a phospholipid, e.g., di-hexadecyl-rac-glycerol or triethylammonium 1,2-di-O-hexadecyl-rac-glycero-3-H-phosphonate (Manoharan et al., Tetrahedron Lett., 1995, 36:3651; Shea et al., Nucl. Acids Res., 1990, 18:3777), a polyamine or a polyethylene glycol chain (Manoharan et al., Nucleosides & Nucleotides, 1995, 14:969), or adamantane acetic acid (Manoharan et al., Tetrahedron Lett., 1995, 36:3651), a palmityl moiety (Mishra et al., Biochim. Biophys. Acta, 1995, 1264:229), or an octadecylamine or hexylamino-carbonyl-oxycholesterol moiety (Crooke et al., J. Pharmacol. Exp. Ther., 1996, 277:923). Representative United States patents that teach the preparation of such dsRNA conjugates have been listed above. Typical conjugation protocols involve the synthesis of dsRNAs bearing an aminolinker at one or more positions of the sequence. The amino group is then reacted with the molecule being conjugated using appropriate coupling or activating reagents. The conjugation reaction may be performed either with the dsRNA still bound to the solid support or following cleavage of the dsRNA in solution phase. Purification of the dsRNA conjugate by HPLC typically affords the pure conjugate.

[0113] In some cases, a ligand can be multifunctional and/or a dsRNA can be conjugated to more than one ligand. For example, the dsRNA can be conjugated to one ligand for improved uptake and to a second ligand for improved release.

[0114] Vector Encoded siRNA Agents

[0115] In another aspect of the invention, Eg5 and VEGF specific dsRNA molecules that are expressed from transcription units inserted into DNA or RNA vectors (see, e.g., Couture, A, et al., TIG. (1996), 12:5-10; Skillern, A., et al., International PCT Publication No. WO 00/22113, Conrad, International PCT Publication No. WO 00/22114, and Conrad, US Pat. No. 6,054,299). These transgenes can be introduced as a linear construct, a circular plasmid, or a viral vector, which can be incorporated and inherited as a transgene integrated into the host genome. The transgene can also be constructed to permit it to be inherited as an extrachromosomal plasmid (Gassmann, et al., Proc. Natl. Acad. Sci. USA (1995) 92:1292).

[0116] The individual strands of a dsRNA can be transcribed by promoters on two separate expression vectors and co-transfected into a target cell. Alternatively each individual strand of the dsRNA can be transcribed by promoters both of which are located on the same expression plasmid. In a preferred embodiment, a dsRNA is expressed as an inverted repeat joined by a linker polynucleotide sequence such that the dsRNA has a stem and loop structure.

[0117] The recombinant dsRNA expression vectors are generally DNA plasmids or viral vectors. dsRNA expressing viral vectors can be constructed based on, but not limited to, adeno-associated virus (for a review, see Muzyczka, et al., Curr. Topics Micro. Immunol. (1992) 158:97-129));

[0118] adenovirus (see, for example, Berkner, et al., BioTechniques (1998) 6:616), Rosenfeld et al. (1991, Science 252:431-434), and Rosenfeld et al. (1992), Cell 68:143-155)); or alphavirus as well as others known in the art. Retroviruses have been used to introduce a variety of genes into many different cell types, including epithelial cells, in vitro and/or in vivo (see, e.g., Eglitis, et al., Science (1985) 230:1395-1398; Danos and Mulligan, Proc. Natl. Acad. Sci. USA (1998) 85:6460-6464; Wilson et al., 1988, Proc. Natl. Acad. Sci. USA 85:3014-3018; Armentano et al., 1990, Proc. Natl. Acad. Sci. USA 87:61416145; Huber et al., 1991, Proc. Natl. Acad. Sci. USA 88:8039-8043; Ferry et al., 1991, Proc. Natl. Acad. Sci. USA 88:8377-8381; Chowdhury et al., 1991, Science 254:1802-1805; van Beusechem. et al., 1992, Proc. Natl. Acad. Sci. USA 89:7640-19 ; Kay et al., 1992, Human Gene Therapy 3:641-647; Dai et al., 1992, Proc.

[0119] Natl. Acad. Sci. USA 89:10892-10895; Hwu et al., 1993, J. Immunol. 150:4104-4115; U.S. Pat. No. 4,868,116; U.S. Pat. No. 4,980,286; PCT Application WO 89/07136; PCT Application WO 89/02468; PCT Application WO 89/05345; and PCT Application WO 92/07573). Recombinant retroviral vectors capable of transducing and expressing genes inserted into the genome of a cell can be produced by transfecting the recombinant retroviral genome into suitable packaging cell lines such as PA317 and Psi-CRIP (Comette et al., 1991, Human Gene Therapy 2:5-10; Cone et al., 1984, Proc. Natl. Acad. Sci. USA 81:6349). Recombinant adenoviral vectors can be used to infect a wide variety of cells and tissues in susceptible hosts (e.g., rat, hamster, dog, and chimpanzee) (Hsu et al., 1992, J. Infectious Disease, 166:769), and also have the advantage of not requiring mitotically active cells for infection.

[0120] Any viral vector capable of accepting the coding sequences for the dsRNA molecule(s) to be expressed can be used, for example vectors derived from adenovirus (AV); adeno-associated virus (AAV); retroviruses (e.g., lentiviruses (LV), Rhabdoviruses, murine leukemia virus); herpes virus, and the like. The tropism of viral vectors can be modified by pseudotyping the vectors with envelope proteins or other surface antigens from other viruses, or by substituting different viral capsid proteins, as appropriate.

[0121] For example, lentiviral vectors of the invention can be pseudotyped with surface proteins from vesicular stomatitis virus (VSV), rabies, Ebola, Mokola, and the like. AAV vectors of the invention can be made to target different cells by engineering the vectors to express different capsid protein serotypes. For example, an AAV vector expressing a serotype 2 capsid on a serotype 2 genome is called AAV 2/2. This serotype 2 capsid gene in the AAV 2/2 vector can be replaced by a serotype 5 capsid gene to produce an AAV 2/5 vector. Techniques for constructing AAV vectors which express different capsid protein serotypes are within the skill in the art; see, e.g., Rabinowitz J E et al. (2002), J Virol 76:791-801, the entire disclosure of which is herein incorporated by reference.

[0122] Selection of recombinant viral vectors suitable for use in the invention, methods for inserting nucleic acid sequences for expressing the dsRNA into the vector, and methods of delivering the viral vector to the cells of interest are within the skill in the art. See, for example, Dornburg R (1995), Gene Therap. 2: 301-310; Eglitis M A (1988), Biotechniques 6: 608-614; Miller A D (1990), Hum Gene Therap. 1: 5-14; Anderson W F (1998), Nature 392: 25-30; and Rubinson D A et al., Nat. Genet. 33: 401-406, the entire disclosures of which are herein incorporated by reference.

[0123] Preferred viral vectors are those derived from AV and AAV. In a particularly preferred embodiment, the dsRNA of the invention is expressed as two separate, complementary single-stranded RNA molecules from a recombinant AAV vector having, for example, either the U6 or H1 RNA promoters, or the cytomegalovirus (CMV) promoter.

[0124] A suitable AV vector for expressing the dsRNA of the invention, a method for constructing the recombinant AV vector, and a method for delivering the vector into target cells, are described in Xia H et al. (2002), Nat. Biotech. 20: 1006-1010.

[0125] Suitable AAV vectors for expressing the dsRNA of the invention, methods for constructing the recombinant AV vector, and methods for delivering the vectors into target cells are described in Samulski R et al. (1987), J. Virol. 61: 3096-3101; Fisher K J et al. (1996), J. Virol, 70: 520-532; Samulski R et al. (1989), J. Virol. 63: 3822-3826; U.S. Pat. No. 5,252,479; U.S. Pat. No. 5,139,941; International Patent Application No. WO 94/13788; and International Patent Application No. WO 93/24641, the entire disclosures of which are herein incorporated by reference.

[0126] The promoter driving dsRNA expression in either a DNA plasmid or viral vector of the invention may be a eukaryotic RNA polymerase I (e.g. ribosomal RNA promoter), RNA polymerase II (e.g. CMV early promoter or actin promoter or Ul snRNA promoter) or generally RNA polymerase III promoter (e.g. U6 snRNA or 7SK RNA promoter) or a prokaryotic promoter, for example the T7 promoter, provided the expression plasmid also encodes T7 RNA polymerase required for transcription from a T7 promoter. The promoter can also direct transgene expression to the pancreas (see, e.g., the insulin regulatory sequence for pancreas (Bucchini et al., 1986, Proc. Natl. Acad. Sci. USA 83:2511-2515)).

[0127] In addition, expression of the transgene can be precisely regulated, for example, by using an inducible regulatory sequence and expression systems such as a regulatory sequence that is sensitive to certain physiological regulators, e.g., circulating glucose levels, or hormones (Docherty et al., 1994, FASEB J. 8:20-24). Such inducible expression systems, suitable for the control of transgene expression in cells or in mammals include regulation by ecdysone, by estrogen, progesterone, tetracycline, chemical inducers of dimerization, and isopropyl-beta-D1-thiogalactopyranoside (EPTG). A person skilled in the art would be able to choose the appropriate regulatory/promoter sequence based on the intended use of the dsRNA transgene.

[0128] Generally, recombinant vectors capable of expressing dsRNA molecules are delivered as described below, and persist in target cells. Alternatively, viral vectors can be used that provide for transient expression of dsRNA molecules. Such vectors can be repeatedly administered as necessary. Once expressed, the dsRNAs bind to target RNA and modulate its function or expression. Delivery of dsRNA expressing vectors can be systemic, such as by intravenous or intramuscular administration, by administration to target cells ex-planted from the patient followed by reintroduction into the patient, or by any other means that allows for introduction into a desired target cell.

[0129] dsRNA expression DNA plasmids are typically transfected into target cells as a complex with cationic lipid carriers (e.g. Oligofectamine) or non-cationic lipid-based carriers (e.g. Transit-TKO™). Multiple lipid transfections for dsRNA-mediated knockdowns targeting different regions of a single EG5 gene (or VEGF gene) or multiple Eg5 genes (or VEGF genes) over a period of a week or more are also contemplated by the invention. Successful introduction of the vectors of the invention into host cells can be monitored using various known methods. For example, transient transfection can be signaled with a reporter, such as a fluorescent marker, such as Green Fluorescent Protein (GFP). Stable transfection of ex vivo cells can be ensured using markers that provide the transfected cell with resistance to specific environmental factors (e.g., antibiotics and drugs), such as hygromycin B resistance.

[0130] The Eg5 specific dsRNA molecules and VEGF specific dsRNA molecules can also be inserted into vectors and used as gene therapy vectors for human patients. Gene therapy vectors can be delivered to a subject by, for example, intravenous injection, local administration (see U.S. Pat. No. 5,328,470) or by stereotactic injection (see e.g., Chen et al. (1994) Proc. Natl. Acad. Sci. USA 91:3054-3057). The pharmaceutical preparation of the gene therapy vector can include the gene therapy vector in an acceptable diluent, or can include a slow release matrix in which the gene delivery vehicle is imbedded. Alternatively, where the complete gene delivery vector can be produced intact from recombinant cells, e.g., retroviral vectors, the pharmaceutical preparation can include one or more cells which produce the gene delivery system.

[0131] Pharmaceutical Compositions Containing dsRNA

[0132] In one embodiment, the invention provides pharmaceutical compositions containing a dsRNA, as described herein, and a pharmaceutically acceptable carrier and methods of administering the same. The pharmaceutical composition containing the dsRNA is useful for treating a disease or disorder associated with the expression or activity of a Eg5/KSP and/or VEGF gene, such as pathological processes mediated by Eg5/KSP and/or VEGF expression, e.g., liver cancer. Such pharmaceutical compositions are formulated based on the mode of delivery.

[0133] Dosage

[0134] The pharmaceutical compositions featured herein are administered in dosages sufficient to inhibit expression of EG5/KSP and/or VEGF genes. In general, a suitable dose of dsRNA will be in the range of 0.01 to 200.0 milligrams (mg) per kilogram (kg) body weight of the recipient per day, generally in the range of 1 to 50 mg per kilogram body weight per day. For example, the dsRNA can be administered at 0.01 mg/kg, 0.05 mg/kg, 0.5 mg/kg, 1 mg/kg, 1.5 mg/kg, 2 mg/kg, 3 mg/kg, 5.0 mg/kg, 10 mg/kg, 20 mg/kg, 30 mg/kg, 40 mg/kg, or 50 mg/kg per single dose.

[0135] The pharmaceutical composition can be administered once daily, or the dsRNA may be administered as two, three, or more sub-doses at appropriate intervals throughout the day. The effect of a single dose on EG5/KSP and/or VEGF levels is long lasting, such that subsequent doses are administered at not more than 7 day intervals, or at not more than 1, 2, 3, or 4 week intervals.

[0136] In some embodiments the dsRNA is administered using continuous infusion or delivery through a controlled release formulation. In that case, the dsRNA contained in each sub-dose must be correspondingly smaller in order to achieve the total daily dosage. The dosage unit can also be compounded for delivery over several days, e.g., using a conventional sustained release formulation which provides sustained release of the dsRNA over a several day period. Sustained release formulations are well known in the art and are particularly useful for delivery of agents at a particular site, such as could be used with the agents of the present invention. In this embodiment, the dosage unit contains a corresponding multiple of the daily dose.

[0137] The skilled artisan will appreciate that certain factors may influence the dosage and timing required to effectively treat a subject, including but not limited to the severity of the disease or disorder, previous treatments, the general health and/or age of the subject, and other diseases present. Moreover, treatment of a subject with a therapeutically effective amount of a composition can include a single treatment or a series of treatments. Estimates of effective dosages and in vivo half-lives for the individual dsRNAs encompassed by the invention can be made using conventional methodologies or on the basis of in vivo testing using an appropriate animal model, as described elsewhere herein.

[0138] Advances in mouse genetics have generated a number of mouse models for the study of various human diseases, such as pathological processes mediated by EG5/KSP AND/OR VEGF expression. Such models are used for in vivo testing of dsRNA, as well as for determining a therapeutically effective dose. A suitable mouse model is, for example, a mouse containing a plasmid expressing human EG5/KSP AND/OR VEGF. Another suitable mouse model is a transgenic mouse carrying a transgene that expresses human EG5/KSP AND/OR VEGF.

[0139] Toxicity and therapeutic efficacy of such compounds can be determined by standard pharmaceutical procedures in cell cultures or experimental animals, e.g., for determining the LD50 (the dose lethal to 50% of the population) and the ED50 (the dose therapeutically effective in 50% of the population). The dose ratio between toxic and therapeutic effects is the therapeutic index and it can be expressed as the ratio LD50/ED50. Compounds that exhibit high therapeutic indices are preferred.

[0140] The data obtained from cell culture assays and animal studies can be used in formulating a range of dosage for use in humans. The dosage of compositions featured in the invention lies generally within a range of circulating concentrations that include the ED50 with little or no toxicity. The dosage may vary within this range depending upon the dosage form employed and the route of administration utilized. For any compound used in the methods featured in the invention, the therapeutically effective dose can be estimated initially from cell culture assays. A dose may be formulated in animal models to achieve a circulating plasma concentration range of the compound or, when appropriate, of the polypeptide product of a target sequence (e.g., achieving a decreased concentration of the polypeptide) that includes the IC50 (i.e., the concentration of the test compound which achieves a half-maximal inhibition of symptoms) as determined in cell culture. Such information can be used to more accurately to determine useful doses in humans. Levels in plasma may be measured, for example, by high performance liquid chromatography.

[0141] In addition to their administration, as discussed above, the dsRNAs featured in the invention can be administered in combination with other known agents effective in treatment of pathological processes mediated by target gene expression. In any event, the administering physician can adjust the amount and timing of dsRNA administration on the basis of results observed using standard measures of efficacy known in the art or described herein.

[0142] Administration

[0143] The pharmaceutical compositions of the present invention may be administered in a number of ways depending upon whether local or systemic treatment is desired and upon the area to be treated. Administration may be topical, pulmonary, e.g., by inhalation or insufflation of powders or aerosols, including by nebulizer; intratracheal, intranasal, epidermal and transdermal, and subdermal, oral or parenteral, e.g., subcutaneous.

[0144] Typically, when treating a mammal with hyperlipidemia, the dsRNA molecules are administered systemically via parental means. Parenteral administration includes intravenous, intra-arterial, subcutaneous, intraperitoneal or intramuscular injection or infusion; or intracranial, e.g., intraparenchymal, intrathecal or intraventricular, administration. For example, dsRNAs, conjugated or unconjugated or formulated with or without liposomes, can be administered intravenously to a patient. For such, a dsRNA molecule can be formulated into compositions such as sterile and non-sterile aqueous solutions, non-aqueous solutions in common solvents such as alcohols, or solutions in liquid or solid oil bases. Such solutions also can contain buffers, diluents, and other suitable additives. For parenteral, intrathecal, or intraventricular administration, a dsRNA molecule can be formulated into compositions such as sterile aqueous solutions, which also can contain buffers, diluents, and other suitable additives (e.g., penetration enhancers, carrier compounds, and other pharmaceutically acceptable carriers). Formulations are described in more detail herein.

[0145] The dsRNA can be delivered in a manner to target a particular tissue, such as the liver (e.g., the hepatocytes of the liver).

[0146] Formulations

[0147] The pharmaceutical formulations of the present invention, which may conveniently be presented in unit dosage form, may be prepared according to conventional techniques well known in the pharmaceutical industry. Such techniques include the step of bringing into association the active ingredients with the pharmaceutical carrier(s) or excipient(s). In general, the formulations are prepared by uniformly and intimately bringing into association the active ingredients with liquid carriers or finely divided solid carriers or both, and then, if necessary, shaping the product.

[0148] The compositions of the present invention may be formulated into any of many possible dosage forms such as, but not limited to, tablets, capsules, gel capsules, liquid syrups, soft gels, suppositories, and enemas. The compositions of the present invention may also be formulated as suspensions in aqueous, non-aqueous or mixed media. Aqueous suspensions may further contain substances which increase the viscosity of the suspension including, for example, sodium carboxymethylcellulose, sorbitol and/or dextran. The suspension may also contain stabilizers.

[0149] Pharmaceutical compositions of the present invention include, but are not limited to, solutions, emulsions, and liposome-containing formulations. These compositions may be generated from a variety of components that include, but are not limited to, preformed liquids, self-emulsifying solids and self-emulsifying semisolids. In one aspect are formulations that target the liver when treating hepatic disorders such as hyperlipidemia.

[0150] In addition, dsRNA that target the EG5/KSP and/or VEGF gene can be formulated into compositions containing the dsRNA admixed, encapsulated, conjugated, or otherwise associated with other molecules, molecular structures, or mixtures of nucleic acids. For example, a composition containing one or more dsRNA agents that target the Eg5/KSP and/or VEGF gene can contain other therapeutic agents, such as other cancer therapeutics or one or more dsRNA compounds that target non-EG5/KSP AND/OR VEGF genes.

[0151] Oral, Parenteral, Topical, and Biologic Formulations

[0152] Compositions and formulations for oral administration include powders or granules, microparticulates, nanoparticulates, suspensions or solutions in water or non-aqueous media, capsules, gel capsules, sachets, tablets or minitablets. Thickeners, flavoring agents, diluents, emulsifiers, dispersing aids or binders may be desirable. In some embodiments, oral formulations are those in which dsRNAs featured in the invention are administered in conjunction with one or more penetration enhancers surfactants and chelators. Suitable surfactants include fatty acids and/or esters or salts thereof, bile acids and/or salts thereof. Suitable bile acids/salts include chenodeoxycholic acid (CDCA) and ursodeoxychenodeoxycholic acid (UDCA), cholic acid, dehydrocholic acid, deoxycholic acid, glucholic acid, glycholic acid, glycodeoxycholic acid, taurocholic acid, taurodeoxycholic acid, sodium tauro-24,25-dihydro-fusidate and sodium glycodihydrofusidate. Suitable fatty acids include arachidonic acid, undecanoic acid, oleic acid, lauric acid, caprylic acid, capric acid, myristic acid, palmitic acid, stearic acid, linoleic acid, linolenic acid, dicaprate, tricaprate, monoolein, dilaurin, glyceryl 1-monocaprate, 1-dodecylazacycloheptan-2-one, an acylcarnitine, an acylcholine, or a monoglyceride, a diglyceride or a pharmaceutically acceptable salt thereof (e.g., sodium). In some embodiments, combinations of penetration enhancers are used, for example, fatty acids/salts in combination with bile acids/salts. One exemplary combination is the sodium salt of lauric acid, capric acid and UDCA. Further penetration enhancers include polyoxyethylene-9-lauryl ether, polyoxyethylene-20-cetyl ether. dsRNAs featured in the invention may be delivered orally, in granular form including sprayed dried particles, or complexed to form micro or nanoparticles. dsRNA complexing agents include poly-amino acids; polyimines; polyacrylates; polyalkylacrylates, polyoxethanes, polyalkylcyanoacrylates; cationized gelatins, albumins, starches, acrylates, polyethyleneglycols (PEG) and starches; polyalkylcyanoacrylates; DEAE-derivatized polyimines, pollulans, celluloses and starches. Suitable complexing agents include chitosan, N-trimethylchitosan, poly-L-lysine, polyhistidine, polyornithine, polyspermines, protamine, polyvinylpyridine, polythiodiethylaminomethylethylene P(TDAE), polyaminostyrene (e.g., p-amino), poly(methylcyanoacrylate), poly(ethylcyanoacrylate), poly(butylcyanoacrylate), poly(isobutylcyanoacrylate), poly(isohexylcynaoacrylate), DEAE-methacrylate, DEAE-hexylacrylate, DEAE-acrylamide, DEAE-albumin and DEAE-dextran, polymethylacrylate, polyhexylacrylate, poly(D,L-lactic acid), poly(DL-lactic-co-glycolic acid (PLGA), alginate, and polyethyleneglycol (PEG). Oral formulations for dsRNAs and their preparation are described in detail in U.S. Pat. No. 6,887,906, U.S. Patent Publication. No. 20030027780, and U.S. Pat. No. 6,747,014, each of which is incorporated herein by reference.

[0153] Compositions and formulations for parenteral, intraparenchymal (into the brain), intrathecal, intraventricular or intrahepatic administration may include sterile aqueous solutions which may also contain buffers, diluents and other suitable additives such as, but not limited to, penetration enhancers, carrier compounds and other pharmaceutically acceptable carriers or excipients.

[0154] Pharmaceutical compositions and formulations for topical administration may include transdermal patches, ointments, lotions, creams, gels, drops, suppositories, sprays, liquids and powders. Conventional pharmaceutical carriers, aqueous, powder or oily bases, thickeners and the like may be necessary or desirable. Suitable topical formulations include those in which the dsRNAs featured in the invention are in admixture with a topical delivery agent such as lipids, liposomes, fatty acids, fatty acid esters, steroids, chelating agents and surfactants. Suitable lipids and liposomes include neutral (e.g., dioleoylphosphatidyl DOPE ethanolamine, dimyristoylphosphatidyl choline DMPC, distearolyphosphatidyl choline) negative (e.g., dimyristoylphosphatidyl glycerol DMPG) and cationic (e.g., dioleoyltetramethylaminopropyl DOTAP and dioleoylphosphatidyl ethanolamine DOTMA). dsRNAs featured in the invention may be encapsulated within liposomes or may form complexes thereto, in particular to cationic liposomes. Alternatively, dsRNAs may be complexed to lipids, in particular to cationic lipids. Suitable fatty acids and esters include but are not limited to arachidonic acid, oleic acid, eicosanoic acid, lauric acid, caprylic acid, capric acid, myristic acid, palmitic acid, stearic acid, linoleic acid, linolenic acid, dicaprate, tricaprate, monoolein, dilaurin, glyceryl 1-monocaprate, 1-dodecylazacycloheptan-2-one, an acylcarnitine, an acylcholine, or a C₁₋₁₀ alkyl ester (e.g., isopropylmyristate IPM), monoglyceride, diglyceride or pharmaceutically acceptable salt thereof. Topical formulations are described in detail in U.S. Pat. No. 6,747,014, which is incorporated herein by reference. In addition, dsRNA molecules can be administered to a mammal as biologic or abiologic means as described in, for example, U.S. Pat. No. 6,271,359. Abiologic delivery can be accomplished by a variety of methods including, without limitation, (1) loading liposomes with a dsRNA acid molecule provided herein and (2) complexing a dsRNA molecule with lipids or liposomes to form nucleic acid-lipid or nucleic acid-liposome complexes. The liposome can be composed of cationic and neutral lipids commonly used to transfect cells in vitro. Cationic lipids can complex (e.g., charge-associate) with negatively charged nucleic acids to form liposomes. Examples of cationic liposomes include, without limitation, lipofectin, lipofectamine, lipofectace, and DOTAP. Procedures for forming liposomes are well known in the art. Liposome compositions can be formed, for example, from phosphatidylcholine, dimyristoyl phosphatidylcholine, dipalmitoyl phosphatidylcholine, dimyristoyl phosphatidylglycerol, or dioleoyl phosphatidylethanolamine. Numerous lipophilic agents are commercially available, including Lipofectin™ (Invitrogen/Life Technologies, Carlsbad, Calif.) and Effectene™ (Qiagen, Valencia, Calif.). In addition, systemic delivery methods can be optimized using commercially available cationic lipids such as DDAB or DOTAP, each of which can be mixed with a neutral lipid such as DOPE or cholesterol. In some cases, liposomes such as those described by Templeton et al. (Nature Biotechnology, 15: 647-652 (1997)) can be used. In other embodiments, polycations such as polyethyleneimine can be used to achieve delivery in vivo and ex vivo (Boletta et al., J. Am Soc. Nephrol. 7: 1728 (1996)). Additional information regarding the use of liposomes to deliver nucleic acids can be found in U.S. Pat. No. 6,271,359, PCT Publication WO 96/40964 and Morrissey, D. et al. 2005. Nat Biotechnol. 23(8):1002-7.

[0155] Biologic delivery can be accomplished by a variety of methods including, without limitation, the use of viral vectors. For example, viral vectors (e.g., adenovirus and herpes virus vectors) can be used to deliver dsRNA molecules to liver cells. Standard molecular biology techniques can be used to introduce one or more of the dsRNAs provided herein into one of the many different viral vectors previously developed to deliver nucleic acid to cells. These resulting viral vectors can be used to deliver the one or more dsRNAs to cells by, for example, infection.

[0156] Liposomal Formulations

[0157] There are many organized surfactant structures besides microemulsions that have been studied and used for the formulation of drugs. These include monolayers, micelles, bilayers and vesicles. Vesicles, such as liposomes, have attracted great interest because of their specificity and the duration of action they offer from the standpoint of drug delivery. As used in the present invention, the term “liposome” means a vesicle composed of amphiphilic lipids arranged in a spherical bilayer or bilayers.

[0158] Liposomes are unilamellar or multilamellar vesicles which have a membrane formed from a lipophilic material and an aqueous interior. The aqueous portion contains the composition to be delivered. Cationic liposomes possess the advantage of being able to fuse to the cell wall. Non-cationic liposomes, although not able to fuse as efficiently with the cell wall, are taken up by macrophages in vivo.

[0159] In order to cross intact mammalian skin, lipid vesicles must pass through a series of fine pores, each with a diameter less than 50 nm, under the influence of a suitable transdermal gradient. Therefore, it is desirable to use a liposome which is highly deformable and able to pass through such fine pores.

[0160] Further advantages of liposomes include: liposomes obtained from natural phospholipids are biocompatible and biodegradable; liposomes can incorporate a wide range of water and lipid soluble drugs; and liposomes can protect encapsulated drugs in their internal compartments from metabolism and degradation (Rosoff, in Pharmaceutical Dosage Forms, Lieberman, Rieger and Banker (Eds.), 1988, Marcel Dekker, Inc., New York, N.Y., volume 1, p. 245). Important considerations in the preparation of liposome formulations are the lipid surface charge, vesicle size and the aqueous volume of the liposomes.

[0161] Liposomes are useful for the transfer and delivery of active ingredients to the site of action. Because the liposomal membrane is structurally similar to biological membranes, when liposomes are applied to a tissue, the liposomes start to merge with the cellular membranes and as the merging of the liposome and cell progresses, the liposomal contents are emptied into the cell where the active agent may act.

[0162] Liposomal formulations have been the focus of extensive investigation as the mode of delivery for many drugs. There is growing evidence that for topical administration, liposomes present several advantages over other formulations. Such advantages include reduced side-effects related to high systemic absorption of the administered drug, increased accumulation of the administered drug at the desired target, and the ability to administer a wide variety of drugs, both hydrophilic and hydrophobic, into the skin.

[0163] Several reports have detailed the ability of liposomes to deliver agents including high-molecular weight DNA into the skin. Compounds including analgesics, antibodies, hormones and high-molecular weight DNAs have been administered to the skin. The majority of applications resulted in the targeting of the upper epidermis

[0164] Liposomes fall into two broad classes. Cationic liposomes are positively charged liposomes which interact with the negatively charged DNA molecules to form a stable complex. The positively charged DNA/liposome complex binds to the negatively charged cell surface and is internalized in an endosome. Due to the acidic pH within the endosome, the liposomes are ruptured, releasing their contents into the cell cytoplasm (Wang et al., Biochem. Biophys. Res. Commun., 1987, 147, 980-985).

[0165] Liposomes which are pH-sensitive or negatively-charged, entrap DNA rather than complex with it. Since both the DNA and the lipid are similarly charged, repulsion rather than complex formation occurs. Nevertheless, some DNA is entrapped within the aqueous interior of these liposomes. pH-sensitive liposomes have been used to deliver DNA encoding the thymidine kinase gene to cell monolayers in culture. Expression of the exogenous gene was detected in the target cells (Zhou et al., Journal of Controlled Release, 1992, 19, 269-274).

[0166] One major type of liposomal composition includes phospholipids other than naturally-derived phosphatidylcholine. Neutral liposome compositions, for example, can be formed from dimyristoyl phosphatidylcholine (DMPC) or dipalmitoyl phosphatidylcholine (DPPC). Anionic liposome compositions generally are formed from dimyristoyl phosphatidylglycerol, while anionic fusogenic liposomes are formed primarily from dioleoyl phosphatidylethanolamine (DOPE). Another type of liposomal composition is formed from phosphatidylcholine (PC) such as, for example, soybean PC, and egg PC. Another type is formed from mixtures of phospholipid and/or phosphatidylcholine and/or cholesterol.

[0167] Several studies have assessed the topical delivery of liposomal drug formulations to the skin. Application of liposomes containing interferon to guinea pig skin resulted in a reduction of skin herpes sores while delivery of interferon via other means (e.g., as a solution or as an emulsion) were ineffective (Weiner et al., Journal of Drug Targeting, 1992, 2, 405-410). Further, an additional study tested the efficacy of interferon administered as part of a liposomal formulation to the administration of interferon using an aqueous system, and concluded that the liposomal formulation was superior to aqueous administration (du Plessis et al., Antiviral Research, 1992, 18, 259-265).

[0168] Non-ionic liposomal systems have also been examined to determine their utility in the delivery of drugs to the skin, in particular systems comprising non-ionic surfactant and cholesterol. Non-ionic liposomal formulations comprising Novasome™ I (glyceryl dilaurate/cholesterol/po-lyoxyethylene-10-stearyl ether) and Novasome™ II (glyceryl distearate/cholesterol/polyoxyethylene-10-stearyl ether) were used to deliver cyclosporin-A into the dermis of mouse skin. Results indicated that such non-ionic liposomal systems were effective in facilitating the deposition of cyclosporin-A into different layers of the skin (Hu et al., S.T.P. Pharma. Sci., 1994, 4, 6, 466).

[0169] Liposomes also include “sterically stabilized” liposomes, a term which, as used herein, refers to liposomes comprising one or more specialized lipids that, when incorporated into liposomes, result in enhanced circulation lifetimes relative to liposomes lacking such specialized lipids. Examples of sterically stabilized liposomes are those in which part of the vesicle-forming lipid portion of the liposome (A) comprises one or more glycolipids, such as monosialoganglioside G_{M1}, or (B) is derivatized with one or more hydrophilic polymers, such as a polyethylene glycol (PEG) moiety. While not wishing to be bound by any particular theory, it is thought in the art that, at least for sterically stabilized liposomes containing gangliosides, sphingomyelin, or PEG-derivatized lipids, the enhanced circulation half-life of these sterically stabilized liposomes derives from a reduced uptake into cells of the reticuloendothelial system (RES) (Allen et al., FEBS Letters, 1987, 223, 42; Wu et al., Cancer Research, 1993, 53, 3765).

[0170] Various liposomes comprising one or more glycolipids are known in the art. Papahadjopoulos et al. (Ann. N.Y. Acad. Sci., 1987, 507, 64) reported the ability of monosialoganglioside G_{M1}, galactocerebroside sulfate and phosphatidylinositol to improve blood half-lives of liposomes. These findings were expounded upon by Gabizon et al. (Proc. Natl. Acad. Sci. U.S.A., 1988, 85, 6949). U.S. Pat. No. 4,837,028 and WO 88/04924, both to Allen et al., disclose liposomes comprising (1) sphingomyelin and (2) the ganglioside G_{M1} or a galactocerebroside sulfate ester. U.S. Pat. No. 5,543,152 (Webb et al.) discloses liposomes comprising sphingomyelin. Liposomes comprising 1,2-sn-dimyristoylphosphat- idylcholine are disclosed in WO 97/13499 (Lim et al.).

[0171] Many liposomes comprising lipids derivatized with one or more hydrophilic polymers, and methods of preparation thereof, are known in the art. Sunamoto et al. (Bull. Chem. Soc. Jpn., 1980, 53, 2778) described liposomes comprising a nonionic detergent, 2C_{1215G}, that contains a PEG moiety. Illum et al. (FEBS Lett., 1984, 167, 79) noted that hydrophilic coating of polystyrene particles with polymeric glycols results in significantly enhanced blood half-lives. Synthetic phospholipids modified by the attachment of carboxylic groups of polyalkylene glycols (e.g., PEG) are described by Sears (U.S. Pat. Nos. 4,426,330 and 4,534,899). Klibanov et al. (FEBS Lett., 1990, 268, 235) described experiments demonstrating that liposomes comprising phosphatidylethanolamine (PE) derivatized with PEG or PEG stearate have significant increases in blood circulation half-lives. Blume et al. (Biochimica et Biophysica Acta, 1990, 1029, 91) extended such observations to other PEG-derivatized phospholipids, e.g., DSPE-PEG, formed from the combination of distearoylphosphatidylethanolamine (DSPE) and PEG. Liposomes having covalently bound PEG moieties on their external surface are described in European Patent No. EP 0 445 131 B1 and WO 90/04384 to Fisher. Liposome compositions containing 1-20 mole percent of PE derivatized with PEG, and methods of use thereof, are described by Woodle et al. (U.S. Pat. Nos. 5,013,556 and 5,356,633) and Martin et al. (U.S. Pat. No. 5,213,804 and European Patent No. EP 0 496 813 B1). Liposomes comprising a number of other lipid-polymer conjugates are disclosed in WO 91/05545 and U.S. Pat. No. 5,225,212 (both to Martin et al.) and in WO 94/20073 (Zalipsky et al.) Liposomes comprising PEG-modified ceramide lipids are described in WO 96/10391 (Choi et al). U.S. Pat. No. 5,540,935 (Miyazaki et al.) and U.S. Pat. No. 5,556,948 (Tagawa et al.) describe PEG-containing liposomes that can be further derivatized with functional moieties on their surfaces.

[0172] A number of liposomes comprising nucleic acids are known in the art. WO 96/40062 to Thierry et al. discloses methods for encapsulating high molecular weight nucleic acids in liposomes. U.S. Pat. No. 5,264,221 to Tagawa et al. discloses protein-bonded liposomes and asserts that the contents of such liposomes may include a dsRNA. U.S. Pat. No. 5,665,710 to Rahman et al. describes certain methods of encapsulating oligodeoxynucleotides in liposomes. WO 97/04787 to Love et al. discloses liposomes comprising dsRNAs targeted to the raf gene.

[0173] Transfersomes are yet another type of liposomes and are highly deformable lipid aggregates which are attractive candidates for drug delivery vehicles. Transfersomes may be described as lipid droplets which are so highly deformable that they are easily able to penetrate through pores which are smaller than the droplet. Transfersomes are adaptable to the environment in which they are used, e.g., they are self-optimizing (adaptive to the shape of pores in the skin), self-repairing, frequently reach their targets without fragmenting, and often self-loading. To make transfersomes, it is possible to add surface edge-activators, usually surfactants, to a standard liposomal composition. Transfersomes have been used to deliver serum albumin to the skin. The transfersome-mediated delivery of serum albumin has been shown to be as effective as subcutaneous injection of a solution containing serum albumin.

[0174] Surfactants find wide application in formulations such as emulsions (including microemulsions) and liposomes. The most common way of classifying and ranking the properties of the many different types of surfactants, both natural and synthetic, is by the use of the hydrophile/lipophile balance (HLB). The nature of the hydrophilic group (also known as the “head”) provides the most useful means for categorizing the different surfactants used in formulations (Rieger, in Pharmaceutical Dosage Forms, Marcel Dekker, Inc., New York, N.Y., 1988, p. 285).

[0175] If the surfactant molecule is not ionized, it is classified as a nonionic surfactant. Nonionic surfactants find wide application in pharmaceutical and cosmetic products and are usable over a wide range of pH values. In general their HLB values range from 2 to about 18 depending on their structure. Nonionic surfactants include nonionic esters such as ethylene glycol esters, propylene glycol esters, glyceryl esters, polyglyceryl esters, sorbitan esters, sucrose esters, and ethoxylated esters. Nonionic alkanolamides and ethers such as fatty alcohol ethoxylates, propoxylated alcohols, and ethoxylated/propoxylated block polymers are also included in this class. The polyoxyethylene surfactants are the most popular members of the nonionic surfactant class.

[0176] If the surfactant molecule carries a negative charge when it is dissolved or dispersed in water, the surfactant is classified as anionic. Anionic surfactants include carboxylates such as soaps, acyl lactylates, acyl amides of amino acids, esters of sulfuric acid such as alkyl sulfates and ethoxylated alkyl sulfates, sulfonates such as alkyl benzene sulfonates, acyl isethionates, acyl taurates and sulfosuccinates, and phosphates. The most important members of the anionic surfactant class are the alkyl sulfates and the soaps.

[0177] If the surfactant molecule carries a positive charge when it is dissolved or dispersed in water, the surfactant is classified as cationic. Cationic surfactants include quaternary ammonium salts and ethoxylated amines. The quaternary ammonium salts are the most used members of this class.

[0178] If the surfactant molecule has the ability to carry either a positive or negative charge, the surfactant is classified as amphoteric. Amphoteric surfactants include acrylic acid derivatives, substituted alkylamides, N-alkylbetaines and phosphatides.

[0179] The use of surfactants in drug products, formulations and in emulsions has been reviewed (Rieger, in Pharmaceutical Dosage Forms, Marcel Dekker, Inc., New York, N.Y., 1988, p. 285).

[0180] Nucleic Acid Lipid Particles

[0181] In one embodiment, a dsRNA featured in the invention is fully encapsulated in the lipid formulation, e.g., to form a nucleic acid-lipid particle. Nucleic acid-lipid particles typically contain a cationic lipid, a non-cationic lipid, a sterol, and a lipid that prevents aggregation of the particle (e.g., a PEG-lipid conjugate). Nucleic acid-lipid particles are extremely useful for systemic applications, as they exhibit extended circulation lifetimes following intravenous (i.v.) injection and accumulate at distal sites (e.g., sites physically separated from the administration site). In addition, the nucleic acids when present in the nucleic acid-lipid particles of the present invention are resistant in aqueous solution to degradation with a nuclease. Nucleic acid-lipid particles and their method of preparation are disclosed in, e.g., U.S. Pat. Nos. 5,976,567; 5,981,501; 6,534,484; 6,586,410; 6,815,432; and PCT Publication No. WO 96/40964.

[0182] Nucleic acid-lipid particles can further include one or more additional lipids and/or other components such as cholesterol. Other lipids may be included in the liposome compositions for a variety of purposes, such as to prevent lipid oxidation or to attach ligands onto the liposome surface. Any of a number of lipids may be present, including amphipathic, neutral, cationic, and anionic lipids. Such lipids can be used alone or in combination. Specific examples of additional lipid components that may be present are described herein.

[0183] Additional components that may be present in a nucleic acid-lipid particle include bilayer stabilizing components such as polyamide oligomers (see, e.g., U.S. Pat. No. 6,320,017), peptides, proteins, detergents, lipid-derivatives, such as PEG coupled to phosphatidylethanolamine and PEG conjugated to ceramides (see, U.S. Pat. No. 5,885,613).

[0184] A nucleic acid-lipid particle can include one or more of a second amino lipid or cationic lipid, a neutral lipid, a sterol, and a lipid selected to reduce aggregation of lipid particles during formation, which may result from steric stabilization of particles which prevents charge-induced aggregation during formation.

[0185] Nucleic acid-lipid particles include, e.g., a SPLP, pSPLP, and SNALP. The term“SNALP” refers to a stable nucleic acid-lipid particle, including SPLP. The term “SPLP” refers to a nucleic acid-lipid particle comprising plasmid DNA encapsulated within a lipid vesicle. SPLPs include “pSPLP,” which include an encapsulated condensing agent-nucleic acid complex as set forth in PCT Publication No. WO 00/03683.

[0186] The particles of the present invention typically have a mean diameter of about 50 nm to about 150 nm, more typically about 60 nm to about 130 nm, more typically about 70 nm to about 110 nm, most typically about 70 nm to about 90 nm, and are substantially nontoxic

[0187] In one embodiment, the lipid to drug ratio (mass/mass ratio) (e.g., lipid to dsRNA ratio) will be in the range of from about 1:1 to about 50:1, from about 1:1 to about 25:1, from about 3:1 to about 15:1, from about 4:1 to about 10:1, from about 5:1 to about 9:1, or about 6:1 to about 9:1, or about 6:1, 7:1, 8:1, 9:1, 10:1, 11:1, 12:1, or 33:1.

[0188] Cationic Lipids

[0189] The nucleic acid-lipid particles of the invention typically include a cationic lipid. The cationic lipid may be, for example, N,N-dioleyl-N,N-dimethylammonium chloride (DODAC), N,N-distearyl-N,N-dimethylammonium bromide (DDAB), N-(I-(2,3-dioleoyloxy)propyl)-N,N,N--trimethylammonium chloride (DOTAP), N-(I-(2,3-dioleyloxy)propyl)-N,N,N-trimethylammonium chloride (DOTMA), N,N-dimethyl-2,3-dioleyloxy)propylamine (DODMA), 1,2-DiLinoleyloxy-N,N-dimethylaminopropane (DLinDMA), 1,2-Dilinolenyloxy-N,N-dimethylaminopropane (DLenDMA), 1,2-Dilinoleylcarbamoyloxy-3-dimethylaminopropane (DLin-C-DAP), 1,2-Dilinoleyoxy-3-(dimethylamino)acetoxypropane (DLin-DAC), 1,2-Dilinoleyoxy-3-morpholinopropane (DLin-MA), 1,2-Dilinoleoyl-3-dimethylaminopropane (DLinDAP), 1,2-Dilinoleylthio-3-dimethylaminopropane (DLin-S-DMA), 1-Linoleoyl-2-linoleyloxy-3-dimethylaminopropane (DLin-2-DMAP), 1,2-Dilinoleyloxy-3-trimethylaminopropane chloride salt (DLin-TMA.Cl), 1,2-Dilinoleoyl-3-trimethylaminopropane chloride salt (DLin-TAP.Cl), 1,2-Dilinoleyloxy-3-(N-methylpiperazino)propane (DLin-MPZ), or 3-(N,N-Dilinoleylamino)-1,2-propanediol (DLinAP), 3-(N,N-Dioleylamino)-1,2-propanedio (DOAP), 1,2-Dilinoleyloxo-3-(2-N,N-dimethylamino)ethoxypropane (DLin-EG-DMA), 1,2-Dilinolenyloxy-N,N-dimethylaminopropane (DLinDMA), 2,2-Dilinoleyl-4-dimethylaminomethyl-[1,3]-dioxolane (DLin-K-DMA) or analogs thereof, (3aR,5s,6aS)-N,N-dimethyl-2,2-di((9Z,12Z)-octadeca-9,12-dienyl)tetrahydro-3aH-cyclopenta[d][1,3]dioxol-5-amine (ALNY-100), (6Z,9Z,28Z,31Z)-heptatriaconta-6,9,28,31-tetraen-19-yl 4-(dimethylamino)butanoate (MC3), or a mixture thereof.

[0190] Other cationic lipids, which carry a net positive charge at about physiological pH, in addition to those specifically described above, may also be included in lipid particles of the invention. Such cationic lipids include, but are not limited to, N,N-dioleyl-N,N-dimethylammonium chloride (“DODAC”); N-(2,3-dioleyloxy)propyl-N,N-N-triethylammonium chloride (“DOTMA”); N,N-distearyl-N,N-dimethylammonium bromide (“DDAB”); N-(2,3-dioleoyloxy)propyl)-N,N,N-trimethylammonium chloride (“DOTAP”); 1,2-Dioleyloxy-3-trimethylaminopropane chloride salt (“DOTAP.Cl”); 3β-(N-(N′,N′-dimethylaminoethane)-carbamoyl)cholesterol (“DC-Chol”), N-(1-(2,3-dioleyloxy)propyl)-N-2-(sperminecarboxamido)ethyl)-N,N-dimethylammonium trifluoracetate (“DOSPA”), dioctadecylamidoglycyl carboxyspermine (“DOGS”), 1,2-dileoyl-sn-3-phosphoethanolamine (“DOPE”), 1,2-dioleoyl-3-dimethylammonium propane (“DODAP”), N,N-dimethyl-2,3-dioleyloxy)propylamine (“DODMA”), and N-(1,2-dimyristyloxyprop-3-yl)-N,N-dimethyl-N-hydroxyethyl ammonium bromide (“DMRIE”). Additionally, a number of commercial preparations of cationic lipids can be used, such as, e.g., LIPOFECTIN (including DOTMA and DOPE, available from GIBCO/BRL), and LIPOFECTAMINE (comprising DOSPA and DOPE, available from GIBCO/BRL). In particular embodiments, a cationic lipid is an amino lipid.

[0191] As used herein, the term “amino lipid” is meant to include those lipids having one or two fatty acid or fatty alkyl chains and an amino head group (including an alkylamino or dialkylamino group) that may be protonated to form a cationic lipid at physiological pH.

[0192] Other amino lipids would include those having alternative fatty acid groups and other dialkylamino groups, including those in which the alkyl substituents are different (e.g., N-ethyl-N-methylamino-, N-propyl-N-ethylamino- and the like). For those embodiments in which R¹¹ and R¹² are both long chain alkyl or acyl groups, they can be the same or different. In general, amino lipids having less saturated acyl chains are more easily sized, particularly when the complexes must be sized below about 0.3 microns, for purposes of filter sterilization. Amino lipids containing unsaturated fatty acids with carbon chain lengths in the range of C₁₄ to C₂₂ are preferred. Other scaffolds can also be used to separate the amino group and the fatty acid or fatty alkyl portion of the amino lipid. Suitable scaffolds are known to those of skill in the art.

[0193] In certain embodiments, amino or cationic lipids of the invention have at least one protonatable or deprotonatable group, such that the lipid is positively charged at a pH at or below physiological pH (e.g. pH 7.4), and neutral at a second pH, preferably at or above physiological pH. It will, of course, be understood that the addition or removal of protons as a function of pH is an equilibrium process, and that the reference to a charged or a neutral lipid refers to the nature of the predominant species and does not require that all of the lipid be present in the charged or neutral form. Lipids that have more than one protonatable or deprotonatable group, or which are zwiterrionic, are not excluded from use in the invention.

[0194] In certain embodiments, protonatable lipids according to the invention have a pKa of the protonatable group in the range of about 4 to about 11. Most preferred is pKa of about 4 to about 7, because these lipids will be cationic at a lower pH formulation stage, while particles will be largely (though not completely) surface neutralized at physiological pH around pH 7.4. One of the benefits of this pKa is that at least some nucleic acid associated with the outside surface of the particle will lose its electrostatic interaction at physiological pH and be removed by simple dialysis; thus greatly reducing the particle's susceptibility to clearance.

[0195] One example of a cationic lipid is 1,2-Dilinolenyloxy-N,N-dimethylaminopropane (DLinDMA). Synthesis and preparation of nucleic acid-lipid particles including DlinDMA is described in International application number PCT/CA2009/00496, filed Apr. 15, 2009.

[0196] In one embodiment, the cationic lipid XTC (2,2-Dilinoleyl-4-dimethylaminoethyl-[1,3]-dioxolane) is used to prepare nucleic acid-lipid particles . Synthesis of XTC is described in U.S. provisional patent application No. 61/107,998 filed on Oct. 23, 2008, which is herein incorporated by reference.

[0197] In another embodiment, the cationic lipid MC3 ((6Z,9Z,28Z,31Z)-heptatriaconta-6,9,28,31-tetraen-19-yl 4-(dimethylamino)butanoate), (e.g., DLin-M-C3-DMA) is used to prepare nucleic acid-lipid particles . Synthesis of MC3 and MC3 comprising formulations are described, e.g., in U.S. Provisional Ser. No. 61/244,834, filed Sep. 22, 2009, and U.S. Provisional Ser. No. 61/185,800, filed Jun. 10, 2009, which are hereby incorporated by reference.

[0198] In another embodiment, the cationic lipid ALNY-100 ((3aR,5s,6aS)-N,N-dimethyl-2,2-di((9Z,12Z)-octadeca-9,12-dienyl)tetrahydro-3aH-cyclopenta[d][1,3]dioxol-5-amine) is used to prepare nucleic acid-lipid particles . Synthesis of ALNY-100 is described in International patent application number PCT/US09/63933 filed on Nov. 10, 2009, which is herein incorporated by reference.

[0199] FIG. 20 illustrates the structures of ALNY-100, MC3, and XTC. The cationic lipid may comprise from about 20 mol % to about 70 mol % or about 45-65 mol % or about 40 mol % of the total lipid present in the particle.

[0200] Non-Cationic Lipids

[0201] The nucleic acid-lipid particles of the invention can include a non-cationic lipid. The non-cationic lipid may be an anionic lipid or a neutral lipid. Examples include but not limited to, distearoylphosphatidylcholine (DSPC), dioleoylphosphatidylcholine (DOPC), dipalmitoylphosphatidylcholine (DPPC), dioleoylphosphatidylglycerol (DOPG), dipalmitoylphosphatidylglycerol (DPPG), dioleoyl-phosphatidylethanolamine (DOPE), palmitoyloleoylphosphatidylcholine (POPC), palmitoyloleoylphosphatidylethanolamine (POPE), dioleoyl- phosphatidylethanolamine 4-(N-maleimidomethyl)-cyclohexane-1-carboxylate (DOPE-mal), dipalmitoyl phosphatidyl ethanolamine (DPPE), dimyristoylphosphoethanolamine (DMPE), distearoyl-phosphatidyl-ethanolamine (DSPE), 16-O-monomethyl PE, 16-O-dimethyl PE, 18-1 -trans PE, 1 -stearoyl-2-oleoyl-phosphatidyethanolamine (SOPE), cholesterol, or a mixture thereof.

[0202] Anionic lipids suitable for use in lipid particles of the invention include, but are not limited to, phosphatidylglycerol, cardiolipin, diacylphosphatidylserine, diacylphosphatidic acid, N-dodecanoyl phosphatidylethanoloamine, N-succinyl phosphatidylethanolamine, N-glutaryl phosphatidylethanolamine, lysylphosphatidylglycerol, and other anionic modifying groups joined to neutral lipids.

[0203] Neutral lipids, when present in the lipid particle, can be any of a number of lipid species which exist either in an uncharged or neutral zwitterionic form at physiological pH. Such lipids include, for example diacylphosphatidylcholine, diacylphosphatidylethanolamine, ceramide, sphingomyelin, dihydrosphingomyelin, cephalin, and cerebrosides. The selection of neutral lipids for use in the particles described herein is generally guided by consideration of, e.g., liposome size and stability of the liposomes in the bloodstream. Preferably, the neutral lipid component is a lipid having two acyl groups, (i.e., diacylphosphatidylcholine and diacylphosphatidylethanolamine). Lipids having a variety of acyl chain groups of varying chain length and degree of saturation are available or may be isolated or synthesized by well-known techniques. In one group of embodiments, lipids containing saturated fatty acids with carbon chain lengths in the range of C₁₄ to C₂₂ are preferred. In another group of embodiments, lipids with mono- or di-unsaturated fatty acids with carbon chain lengths in the range of C₁₄ to C₂₂ are used. Additionally, lipids having mixtures of saturated and unsaturated fatty acid chains can be used. Preferably, the neutral lipids used in the invention are DOPE, DSPC, POPC, or any related phosphatidylcholine. The neutral lipids useful in the invention may also be composed of sphingomyelin, dihydrosphingomyeline, or phospholipids with other head groups, such as serine and inositol.

[0204] In one embodiment the non-cationic lipid is distearoylphosphatidylcholine (DSPC). In another embodiment the non-cationic lipid is dipalmitoylphosphatidylcholine (DPPC). The non-cationic lipid may be from about 5 mol % to about 90 mol %, about 5 mol % to about 10 mol %, about 10 mol %, or about 58 mol % if cholesterol is included, of the total lipid present in the particle.

[0205] Conjugated Lipids

[0206] Conjugated lipids can be used in nucleic acid-lipid particle to prevent aggregation, including polyethylene glycol (PEG)-modified lipids, monosialoganglioside Gml, and polyamide oligomers (“PAO”) such as (described in U.S. Pat. No. 6,320,017). Other compounds with uncharged, hydrophilic, steric-barrier moieties, which prevent aggregation during formulation, like PEG, Gml or ATTA, can also be coupled to lipids for use as in the methods and compositions of the invention. ATTA-lipids are described, e.g., in U.S. Pat. No. 6,320,017, and PEG-lipid conjugates are described, e.g., in U.S. Pat. Nos. 5,820,873, 5,534,499 and 5,885,613. Typically, the concentration of the lipid component selected to reduce aggregation is about 1 to 15% (by mole percent of lipids).

[0207] Specific examples of PEG-modified lipids (or lipid-polyoxyethylene conjugates) that are useful in the invention can have a variety of “anchoring” lipid portions to secure the PEG portion to the surface of the lipid vesicle. Examples of suitable PEG-modified lipids include PEG-modified phosphatidylethanolamine and phosphatidic acid, PEG-ceramide conjugates (e.g., PEG-CerC14 or PEG-CerC20) which are described in co-pending U.S. Ser. No. 08/486,214, incorporated herein by reference, PEG-modified dialkylamines and PEG-modified 1,2-diacyloxypropan-3-amines. Particularly preferred are PEG-modified diacylglycerols and dialkylglycerols.

[0208] In embodiments where a sterically-large moiety such as PEG or ATTA are conjugated to a lipid anchor, the selection of the lipid anchor depends on what type of association the conjugate is to have with the lipid particle. It is well known that mePEG (mw2000)-diastearoylphosphatidylethanolamine (PEG-DSPE) will remain associated with a liposome until the particle is cleared from the circulation, possibly a matter of days. Other conjugates, such as PEG-CerC20 have similar staying capacity. PEG-CerC14, however, rapidly exchanges out of the formulation upon exposure to serum, with a T_{1/2} less than 60 mins. in some assays. As illustrated in U.S. patent application Ser. No. 08/486,214, at least three characteristics influence the rate of exchange: length of acyl chain, saturation of acyl chain, and size of the steric-barrier head group. Compounds having suitable variations of these features may be useful for the invention. For some therapeutic applications, it may be preferable for the PEG-modified lipid to be rapidly lost from the nucleic acid-lipid particle in vivo and hence the PEG-modified lipid will possess relatively short lipid anchors. In other therapeutic applications, it may be preferable for the nucleic acid-lipid particle to exhibit a longer plasma circulation lifetime and hence the PEG-modified lipid will possess relatively longer lipid anchors. Exemplary lipid anchors include those having lengths of from about C₁₄ to about C₂₂, preferably from about C₁₄ to about C₁₆. In some embodiments, a PEG moiety, for example an mPEG-NH₂, has a size of about 1000, 2000, 5000, 10,000, 15,000 or 20,000 daltons.

[0209] It should be noted that aggregation preventing compounds do not necessarily require lipid conjugation to function properly. Free PEG or free ATTA in solution may be sufficient to prevent aggregation. If the particles are stable after formulation, the PEG or ATTA can be dialyzed away before administration to a subject.

[0210] The conjugated lipid that inhibits aggregation of particles may be, for example, a polyethyleneglycol (PEG)-lipid including, without limitation, a PEG-diacylglycerol (DAG), a PEG-dialkyloxypropyl (DAA), a PEG-phospholipid, a PEG-ceramide (Cer), or a mixture thereof. The PEG-DAA conjugate may be, for example, a PEG-dilauryloxypropyl (Ci₂), a PEG-dimyristyloxypropyl (Ci₄), a PEG-dipalmityloxypropyl (Ci₆), or a PEG-distearyloxypropyl (C]₈). Additional conjugated lipids include polyethylene glycol-didimyristoyl glycerol (C14-PEG or PEG-C14, where PEG has an average molecular weight of 2000 Da) (PEG-DMG); (R)-2,3-bis(octadecyloxy)propyl1-(methoxy poly(ethylene glycol)2000)propylcarbamate) (PEG-DSG); PEG-carbamoyl-1,2-dimyristyloxypropylamine, in which PEG has an average molecular weight of 2000 Da (PEG-cDMA); N-Acetylgalactosamine-(R)-2,3-bis(octadecyloxy)propyl1-(methoxy poly(ethylene glycol)2000)propylcarbamate)) (GalNAc-PEG-DSG); and polyethylene glycol-dipalmitoylglycerol (PEG-DPG).

[0211] In one embodiment the conjugated lipid is PEG-DMG. In another embodiment the conjugated lipid is PEG-cDMA. In still another embodiment the conjugated lipid is PEG-DPG. Alternatively the conjugated lipid is GalNAc-PEG-DSG.

[0212] The conjugated lipid that prevents aggregation of particles may be from 0 mol % to about 20 mol % or about 0.5 to about 5.0 mol % or about 2 mol % of the total lipid present in the particle.

[0213] The sterol component of the lipid mixture, when present, can be any of those sterols conventionally used in the field of liposome, lipid vesicle or lipid particle preparation. A preferred sterol is cholesterol.

[0214] In some embodiments, the nucleic acid-lipid particle further includes a sterol, e.g., a cholesterol at, e.g., about 10 mol % to about 60 mol % or about 25 to about 40 mol % or about 48 mol % of the total lipid present in the particle.

[0215] Lipoproteins

[0216] In one embodiment, the formulations of the invention further comprise an apolipoprotein. As used herein, the term “apolipoprotein” or “lipoprotein” refers to apolipoproteins known to those of skill in the art and variants and fragments thereof and to apolipoprotein agonists, analogues or fragments thereof described below.

[0217] Suitable apolipoproteins include, but are not limited to, ApoA-I, ApoA-II, ApoA-IV, ApoA-V and ApoE, and active polymorphic forms, isoforms, variants and mutants as well as fragments or truncated forms thereof. In certain embodiments, the apolipoprotein is a thiol containing apolipoprotein. “Thiol containing apolipoprotein” refers to an apolipoprotein, variant, fragment or isoform that contains at least one cysteine residue. The most common thiol containing apolipoproteins are ApoA-I Milano (ApoA-I_{M}) and ApoA-I Paris (ApoA-I_{P}) which contain one cysteine residue (Jia et al., 2002, Biochem. Biophys. Res. Comm. 297: 206-13; Bielicki and Oda, 2002, Biochemistry 41: 2089-96). ApoA-II, ApoE2 and ApoE3 are also thiol containing apolipoproteins. Isolated ApoE and/or active fragments and polypeptide analogues thereof, including recombinantly produced forms thereof, are described in U.S. Pat. Nos. 5,672,685; 5,525,472; 5,473,039; 5,182,364; 5,177,189; 5,168,045; 5,116,739; the disclosures of which are herein incorporated by reference. ApoE3 is disclosed in Weisgraber, et al., “Human E apoprotein heterogeneity: cysteine-arginine interchanges in the amino acid sequence of the apo-E isoforms,” J. Biol. Chem. (1981) 256: 9077-9083; and Rall, et al., “Structural basis for receptor binding heterogeneity of apolipoprotein E from type III hyperlipoproteinemic subjects,” Proc. Nat. Acad. Sci. (1982) 79: 4696-4700. (See also GenBank accession number K00396.)

[0218] In certain embodiments, the apolipoprotein can be in its mature form, in its preproapolipoprotein form or in its proapolipoprotein form. Homo- and heterodimers (where feasible) of pro- and mature ApoA-I (Duverger et al., 1996, Arterioscler. Thromb. Vasc. Biol. 16(12):1424-29), ApoA-I Milano (Klon et al., 2000, Biophys. J. 79:(3)1679-87; Franceschini et al., 1985, J. Biol. Chem. 260: 1632-35), ApoA-I Paris (Daum et al., 1999, J. Mol. Med. 77:614-22), ApoA-II (Shelness et al., 1985, J. Biol. Chem. 260(14):8637-46; Shelness et al., 1984, J. Biol. Chem. 259(15):9929-35), ApoA-IV (Duverger et al., 1991, Euro. J. Biochem. 201(2):373-83), and ApoE (McLean et al., 1983, J. Biol. Chem. 258(14):8993-9000) can also be utilized within the scope of the invention.

[0219] In certain embodiments, the apolipoprotein can be a fragment, variant or isoform of the apolipoprotein. The term “fragment” refers to any apolipoprotein having an amino acid sequence shorter than that of a native apolipoprotein and which fragment retains the activity of native apolipoprotein, including lipid binding properties. By “variant” is meant substitutions or alterations in the amino acid sequences of the apolipoprotein, which substitutions or alterations, e.g., additions and deletions of amino acid residues, do not abolish the activity of native apolipoprotein, including lipid binding properties. Thus, a variant can comprise a protein or peptide having a substantially identical amino acid sequence to a native apolipoprotein provided herein in which one or more amino acid residues have been conservatively substituted with chemically similar amino acids. Examples of conservative substitutions include the substitution of at least one hydrophobic residue such as isoleucine, valine, leucine or methionine for another. Likewise, the present invention contemplates, for example, the substitution of at least one hydrophilic residue such as, for example, between arginine and lysine, between glutamine and asparagine, and between glycine and serine (see U.S. Pat. Nos. 6,004,925, 6,037,323 and 6,046,166). The term “isoform” refers to a protein having the same, greater or partial function and similar, identical or partial sequence, and may or may not be the product of the same gene and usually tissue specific (see Weisgraber 1990, J. Lipid Res. 31(8):1503-11; Hixson and Powers 1991, J. Lipid Res. 32(9):1529-35; Lackner et al., 1985, J. Biol. Chem. 260(2):703-6; Hoeg et al., 1986, J. Biol. Chem. 261(9):3911-4; Gordon et al., 1984, J. Biol. Chem. 259(1):468-74; Powell et al., 1987, Cell 50(6):831-40; Aviram et al., 1998, Arterioscler. Thromb. Vase. Biol. 18(10):1617-24; Aviram et al., 1998, J. Clin. Invest. 101(8):1581-90; Billecke et al., 2000, Drug Metab. Dispos. 28(11):1335-42; Draganov et al., 2000, J. Biol. Chem. 275(43):33435-42; Steinmetz and Utermann 1985, J. Biol. Chem. 260(4):2258-64; Widler et al., 1980, J. Biol. Chem. 255(21):10464-71; Dyer et al., 1995, J. Lipid Res. 36(1):80-8; Sacre et al., 2003, FEBS Lett. 540(1-3):181-7; Weers, et al., 2003, Biophys. Chem. 100(1-3):481-92; Gong et al., 2002, J. Biol. Chem. 277(33):29919-26; Ohta et al., 1984, J. Biol. Chem. 259(23):14888-93 and U.S. Pat. No. 6,372,886).

[0220] In certain embodiments, the methods and compositions of the present invention include the use of a chimeric construction of an apolipoprotein. For example, a chimeric construction of an apolipoprotein can be comprised of an apolipoprotein domain with high lipid binding capacity associated with an apolipoprotein domain containing ischemia reperfusion protective properties. A chimeric construction of an apolipoprotein can be a construction that includes separate regions within an apolipoprotein (i.e., homologous construction) or a chimeric construction can be a construction that includes separate regions between different apolipoproteins (i.e., heterologous constructions). Compositions comprising a chimeric construction can also include segments that are apolipoprotein variants or segments designed to have a specific character (e.g., lipid binding, receptor binding, enzymatic, enzyme activating, antioxidant or reduction-oxidation property) (see Weisgraber 1990, J. Lipid Res. 31(8):1503-1 1; Hixson and Powers 1991, J. Lipid Res. 32(9):1529-35; Lackner et al., 1985, J. Biol. Chem. 260(2):703-6; Hoeg et al., 1986, J. Biol. Chem. 261(9):3911-4; Gordon et al., 1984, J. Biol. Chem. 259(1):468-74; Powell et al., 1987, Cell 50(6):831-40; Aviram et al., 1998, Arterioscler. Thromb. Vasc. Biol. 18(10):1617-24; Aviram et al., 1998, J. Clin. Invest. 101(8):1581-90; Billecke et al., 2000, Drug Metab. Dispos. 28(11):1335-42; Draganov et al., 2000, J. Biol. Chem. 275(43):33435-42; Steinmetz and Utermann 1985, J. Biol. Chem. 260(4):2258-64; Widler et al., 1980, J. Biol. Chem. 255(21):10464-71; Dyer et al., 1995, J. Lipid Res. 36(1):80-8; Sorenson et al., 1999, Arterioscler. Thromb. Vasc. Biol. 19(9):2214-25; Palgunachari 1996, Arterioscler. Throb. Vasc. Biol. 16(2):328-38: Thurberg et al., J. Biol. Chem. 271(11):6062-70; Dyer 1991, J. Biol. Chem. 266(23):150009-15; Hill 1998, J. Biol. Chem. 273(47):30979-84).

[0221] Apolipoproteins utilized in the invention also include recombinant, synthetic, semi-synthetic or purified apolipoproteins. Methods for obtaining apolipoproteins or equivalents thereof, utilized by the invention are well-known in the art. For example, apolipoproteins can be separated from plasma or natural products by, for example, density gradient centrifugation or immunoaffinity chromatography, or produced synthetically, semi-synthetically or using recombinant DNA techniques known to those of the art (see, e.g., Mulugeta et al., 1998, J. Chromatogr. 798(1-2): 83-90; Chung et al., 1980, J. Lipid Res. 21(3):284-91; Cheung et al., 1987, J. Lipid Res. 28(8):913-29; Persson, et al., 1998, J. Chromatogr. 711:97-109; U.S. Pat. Nos. 5,059,528, 5,834,596, 5,876,968 and 5,721,114; and PCT Publications WO 86/04920 and WO 87/02062).

[0222] Apolipoproteins utilized in the invention further include apolipoprotein agonists such as peptides and peptide analogues that mimic the activity of ApoA-I, ApoA-I Milano (ApoA-I_{M}), ApoA-I Paris (ApoA-I_{P}), ApoA-II, ApoA-IV, and ApoE. For example, the apolipoprotein can be any of those described in U.S. Pat. Nos. 6,004,925, 6,037,323, 6,046,166, and 5,840,688, the contents of which are incorporated herein by reference in their entireties.

[0223] Apolipoprotein agonist peptides or peptide analogues can be synthesized or manufactured using any technique for peptide synthesis known in the art including, e.g., the techniques described in U.S. Pat. Nos. 6,004,925, 6,037,323 and 6,046,166. For example, the peptides may be prepared using the solid-phase synthetic technique initially described by Merrifield (1963, J. Am. Chem. Soc. 85:2149-2154). Other peptide synthesis techniques may be found in Bodanszky et al., Peptide Synthesis, John Wiley & Sons, 2d Ed., (1976) and other references readily available to those skilled in the art. A summary of polypeptide synthesis techniques can be found in Stuart and Young, Solid Phase Peptide. Synthesis, Pierce Chemical Company, Rockford, Ill., (1984). Peptides may also be synthesized by solution methods as described in The Proteins, Vol. II, 3d Ed., Neurath et al., Eds., p. 105-237, Academic Press, New York, N.Y. (1976). Appropriate protective groups for use in different peptide syntheses are described in the above-mentioned texts as well as in McOmie, Protective Groups in Organic Chemistry, Plenum Press, New York, N.Y. (1973). The peptides of the present invention might also be prepared by chemical or enzymatic cleavage from larger portions of, for example, apolipoprotein A-I.

[0224] In certain embodiments, the apolipoprotein can be a mixture of apolipoproteins. In one embodiment, the apolipoprotein can be a homogeneous mixture, that is, a single type of apolipoprotein. In another embodiment, the apolipoprotein can be a heterogeneous mixture of apolipoproteins, that is, a mixture of two or more different apolipoproteins. Embodiments of heterogenous mixtures of apolipoproteins can comprise, for example, a mixture of an apolipoprotein from an animal source and an apolipoprotein from a semi-synthetic source. In certain embodiments, a heterogenous mixture can comprise, for example, a mixture of ApoA-I and ApoA-I Milano. In certain embodiments, a heterogeneous mixture can comprise, for example, a mixture of ApoA-I Milano and ApoA-I Paris. Suitable mixtures for use in the methods and compositions of the invention will be apparent to one of skill in the art.

[0225] If the apolipoprotein is obtained from natural sources, it can be obtained from a plant or animal source. If the apolipoprotein is obtained from an animal source, the apolipoprotein can be from any species. In certain embodiments, the apolipoprotien can be obtained from an animal source. In certain embodiments, the apolipoprotein can be obtained from a human source. In preferred embodiments of the invention, the apolipoprotein is derived from the same species as the individual to which the apolipoprotein is administered.

[0226] Other Components

[0227] In numerous embodiments, amphipathic lipids are included in lipid particles of the invention. “Amphipathic lipids” refer to any suitable material, wherein the hydrophobic portion of the lipid material orients into a hydrophobic phase, while the hydrophilic portion orients toward the aqueous phase. Such compounds include, but are not limited to, phospholipids, aminolipids, and sphingolipids. Representative phospholipids include sphingomyelin, phosphatidylcholine, phosphatidylethanolamine, phosphatidylserine, phosphatidylinositol, phosphatidic acid, palmitoyloleoyl phosphatdylcholine, lysophosphatidylcholine, lysophosphatidylethanolamine, dipalmitoylphosphatidylcholine, dioleoylphosphatidylcholine, distearoylphosphatidylcholine, or dilinoleylphosphatidylcholine. Other phosphorus-lacking compounds, such as sphingolipids, glycosphingolipid families, diacylglycerols, and β-acyloxyacids, can also be used. Additionally, such amphipathic lipids can be readily mixed with other lipids, such as triglycerides and sterols.

[0228] Also suitable for inclusion in the lipid particles of the invention are programmable fusion lipids. Such lipid particles have little tendency to fuse with cell membranes and deliver their payload until a given signal event occurs. This allows the lipid particle to distribute more evenly after injection into an organism or disease site before it starts fusing with cells. The signal event can be, for example, a change in pH, temperature, ionic environment, or time. In the latter case, a fusion delaying or “cloaking” component, such as an ATTA-lipid conjugate or a PEG-lipid conjugate, can simply exchange out of the lipid particle membrane over time. Exemplary lipid anchors include those having lengths of from about C₁₄ to about C₂₂, preferably from about C₁₄ to about C₁₆. In some embodiments, a PEG moiety, for example an mPEG-NH₂, has a size of about 1000, 2000, 5000, 10,000, 15,000 or 20,000 daltons.

[0229] A lipid particle conjugated to a nucleic acid agent can also include a targeting moiety, e.g., a targeting moiety that is specific to a cell type or tissue. Targeting of lipid particles using a variety of targeting moieties, such as ligands, cell surface receptors, glycoproteins, vitamins (e.g., riboflavin) and monoclonal antibodies, has been previously described (see, e.g., U.S. Pat. Nos. 4,957,773 and 4,603,044). The targeting moieties can include the entire protein or fragments thereof. Targeting mechanisms generally require that the targeting agents be positioned on the surface of the lipid particle in such a manner that the targeting moiety is available for interaction with the target, for example, a cell surface receptor. A variety of different targeting agents and methods are known and available in the art, including those described, e.g., in Sapra, P. and Allen, T M, Prog. Lipid Res. 42(5):439-62 (2003); and Abra, R M et al., J. Liposome Res. 12:1-3, (2002).

[0230] The use of lipid particles, i.e., liposomes, with a surface coating of hydrophilic polymer chains, such as polyethylene glycol (PEG) chains, for targeting has been proposed (Allen, et al., Biochimica et Biophysica Acta 1237: 99-108 (1995); DeFrees, et al., Journal of the American Chemistry Society 118: 6101-6104 (1996); Blume, et al., Biochimica et Biophysica Acta 1149: 180-184 (1993); Klibanov, et al., Journal of Liposome Research 2: 321-334 (1992); U.S. Pat. No. 5,013556; Zalipsky, Bioconjugate Chemistry 4: 296-299 (1993); Zalipsky, FEBS Letters 353: 71-74 (1994); Zalipsky, in Stealth Liposomes Chapter 9 (Lasic and Martin, Eds) CRC Press, Boca Raton Fla. (1995). In one approach, a ligand, such as an antibody, for targeting the lipid particle is linked to the polar head group of lipids forming the lipid particle. In another approach, the targeting ligand is attached to the distal ends of the PEG chains forming the hydrophilic polymer coating (Klibanov, et al., Journal of Liposome Research 2: 321-334 (1992); Kirpotin et al., FEBS Letters 388: 115-118 (1996)).

[0231] Standard methods for coupling the target agents can be used. For example, phosphatidylethanolamine, which can be activated for attachment of target agents, or derivatized lipophilic compounds, such as lipid-derivatized bleomycin, can be used. Antibody-targeted liposomes can be constructed using, for instance, liposomes that incorporate protein A (see, Renneisen, et al., J. Bio. Chem., 265:16337-16342 (1990) and Leonetti, et al., Proc. Natl. Acad. Sci. (USA), 87:2448-2451 (1990). Other examples of antibody conjugation are disclosed in U.S. Pat. No. 6,027,726, the teachings of which are incorporated herein by reference. Examples of targeting moieties can also include other proteins, specific to cellular components, including antigens associated with neoplasms or tumors. Proteins used as targeting moieties can be attached to the liposomes via covalent bonds (see, Heath, Covalent Attachment of Proteins to Liposomes, 149 Methods in Enzymology 111-119 (Academic Press, Inc. 1987)). Other targeting methods include the biotin-avidin system.

[0232] Production of Nucleic Acid-Lipid Particles

[0233] In one embodiment, the nucleic acid-lipid particle formulations of the invention are produced via an extrusion method or an in-line mixing method.

[0234] The extrusion method (also refer to as preformed method or batch process) is a method where the empty liposomes (i.e. no nucleic acid) are prepared first, followed by the addition of nucleic acid to the empty liposome. Extrusion of liposome compositions through a small-pore polycarbonate membrane or an asymmetric ceramic membrane results in a relatively well-defined size distribution. Typically, the suspension is cycled through the membrane one or more times until the desired liposome complex size distribution is achieved. The liposomes may be extruded through successively smaller-pore membranes, to achieve a gradual reduction in liposome size. In some instances, the lipid-nucleic acid compositions which are formed can be used without any sizing. These methods are disclosed in the U.S. Pat. No. 5,008,050; U.S. Pat. No. 4,927,637; U.S. Pat. No. 4,737,323; Biochim Biophys Acta. 1979 Oct. 19;557(1):9-23; Biochim Biophys Acta. 1980 Oct. 2;601(3):559-7; Biochim Biophys Acta. 1986 Jun. 13;858(1):161-8; and Biochim. Biophys. Acta 1985 812, 55-65, which are hereby incorporated by reference in their entirety.

[0235] The in-line mixing method is a method wherein both the lipids and the nucleic acid are added in parallel into a mixing chamber. The mixing chamber can be a simple T-connector or any other mixing chamber that is known to one skill in the art. These methods are disclosed in U.S. Pat. No. 6,534,018 and U.S. Pat. No. 6,855,277; US publication 2007/0042031 and Pharmaceuticals Research, Vol. 22, No. 3, Mar. 2005, p. 362-372, which are hereby incorporated by reference in their entirety.

[0236] It is further understood that the formulations of the invention can be prepared by any methods known to one of ordinary skill in the art.

[0237] Characterization of Nucleic Acid-Lipid Particles

[0238] Formulations prepared by either the standard or extrusion-free method can be characterized in similar manners. For example, formulations are typically characterized by visual inspection. They should be whitish translucent solutions free from aggregates or sediment. Particle size and particle size distribution of lipid-nanoparticles can be measured by light scattering using, for example, a Malvern Zetasizer Nano ZS (Malvern, USA). Particles should be about 20-300 nm, such as 40-100 nm in size. The particle size distribution should be unimodal. The total siRNA concentration in the formulation, as well as the entrapped fraction, is estimated using a dye exclusion assay. A sample of the formulated siRNA can be incubated with an RNA-binding dye, such as Ribogreen (Molecular Probes) in the presence or absence of a formulation disrupting surfactant, e.g., 0.5% Triton-X100. The total siRNA in the formulation can be determined by the signal from the sample containing the surfactant, relative to a standard curve. The entrapped fraction is determined by subtracting the “free” siRNA content (as measured by the signal in the absence of surfactant) from the total siRNA content. Percent entrapped siRNA is typically >85%. In one embodiment, the formulations of the invention are entrapped by at least 75%, at least 80% or at least 90%.

[0239] For nucleic acid-lipid particle formulations, the particle size is at least 30 nm, at least 40 nm, at least 50 nm, at least 60 nm, at least 70 nm, at least 80 nm, at least 90 nm, at least 100 nm, at least 110 nm, and at least 120 nm. The suitable range is typically about at least 50 nm to about at least 110 nm, about at least 60 nm to about at least 100 nm, or about at least 80 nm to about at least 90 nm.

[0240] Formulations of Nucleic Acid-Lipid Particles

[0241] LNP01

[0242] One example of synthesis of a nucleic acid-lipid particle is as follows. Nucleic acid-lipid particles are synthesized using the lipidoid ND98.4HCl (MW 1487) (Formula 1), Cholesterol (Sigma-Aldrich), and PEG-Ceramide C16 (Avanti Polar Lipids) ,. This nucleic acid-lipid particle is sometimes referred to as a LNP01 particles. Stock solutions of each in ethanol can be prepared as follows: ND98, 133 mg/ml; Cholesterol, 25 mg/ml, PEG-Ceramide C16, 100 mg/ml. The ND98, Cholesterol, and PEG-Ceramide C16 stock solutions can then be combined in a, e.g., 42:48:10 molar ratio. The combined lipid solution can be mixed with aqueous siRNA (e.g., in sodium acetate pH 5) such that the final ethanol concentration is about 35-45% and the final sodium acetate concentration is about 100-300 mM. Lipid-siRNA nanoparticles typically form spontaneously upon mixing. Depending on the desired particle size distribution, the resultant nanoparticle mixture can be extruded through a polycarbonate membrane (e.g., 100 nm cut-off) using, for example, a thermobarrel extruder, such as Lipex Extruder (Northern Lipids, Inc). In some cases, the extrusion step can be omitted. Ethanol removal and simultaneous buffer exchange can be accomplished by, for example, dialysis or tangential flow filtration. Buffer can be exchanged with, for example, phosphate buffered saline (PBS) at about pH 7, e.g., about pH 6.9, about pH 7.0, about pH 7.1, about pH 7.2, about pH 7.3, or about pH 7.4.

[chemical structure]

[0243] LNP01 formulations are described, e.g., in International Application Publication No. WO 2008/042973, which is hereby incorporated by reference.

[0244] Additional exemplary nucleic acid-lipid particle formulations are described in the following table. It is to be understood that the name of the nucleic acid-lipid particle in the table is not meant to be limiting. For example, as used herein, the term SNALP refers to a formulations that includes the cationic lipid DLinDMA.

| | cationic lipid/non-cationic lipid/cholesterol/ |
|---|---|
| | PEG-lipid conjugate mol % ratio |
| Name | Lipid:siRNA ratio |
| SNALP | DLinDMA/DPPC/Cholesterol/PEG-cDMA |
| | (57.1/7.1/34.4/1.4) |
| | lipid:siRNA ~7:1 |
| LNP-S-X | XTC/DPPC/Cholesterol/PEG-cDMA |
| | 57.1/7.1/34.4/1.4 |
| | lipid:siRNA ~7:1 |
| LNP05 | XTC/DSPC/Cholesterol/PEG-DMG |
| | 57.5/7.5/31.5/3.5 |
| | lipid:siRNA ~6:1 |
| LNP06 | XTC/DSPC/Cholesterol/PEG-DMG |
| | 57.5/7.5/31.5/3.5 |
| | lipid:siRNA ~11:1 |
| LNP07 | XTC/DSPC/Cholesterol/PEG-DMG |
| | 60/7.5/31/1.5, |
| | lipid: siRNA ~6:1 |
| LNP08 | XTC/DSPC/Cholesterol/PEG-DMG |
| | 60/7.5/31/1.5, |
| | lipid: siRNA ~11:1 |
| LNP09 | XTC/DSPC/Cholesterol/PEG-DMG |
| | 50/10/38.5/1.5 |
| | lipid:siRNA ~10:1 |
| LNP10 | ALNY-100/DSPC/Cholesterol/PEG-DMG |
| | 50/10/38.5/1.5 |
| | lipid:siRNA ~10:1 |
| LNP11 | MC3/DSPC/Cholesterol/PEG-DMG |
| | 50/10/38.5/1.5 |
| | lipid:siRNA ~10:1 |
| LNP13 | XTC/DSPC/Cholesterol/PEG-DMG |
| | 50/10/38.5/1.5 |
| | lipid:siRNA ~33:1 |
| LNP14 | MC3/DSPC/Cholesterol/PEG-DMG |
| | 40/15/40/5 |
| | lipid:siRNA ~11:1 |
| LNP15 | MC3/DSPC/Cholesterol/PEG-DSG/ |
| | GalNAc-PEG-DSG 50/10/35/4.5/0.5 |
| | lipid:siRNA ~11:1 |
| LNP16 | MC3/DSPC/Cholesterol/PEG-DMG |
| | 50/10/38.5/1.5 |
| | lipid:siRNA ~7:1 |
| LNP17 | MC3/DSPC/Cholesterol/PEG-DSG |
| | 50/10/38.5/1.5 |
| | lipid:siRNA ~10:1 |
| LNP18 | MC3/DSPC/Cholesterol/PEG-DMG |
| | 50/10/38.5/1.5 |
| | lipid:siRNA ~12:1 |
| LNP19 | MC3/DSPC/Cholesterol/PEG-DMG |
| | 50/10/35/5 |
| | lipid:siRNA ~8:1 |
| LNP20 | MC3/DSPC/Cholesterol/PEG-DPG |
| | 50/10/38.5/1.5 |
| | lipid:siRNA ~10:1 |
| LNP22 | XTC/DSPC/Cholesterol/PEG-DSG |
| | 50/10/38.5/1.5 |
| | lipid: siRNA ~10:1 |

[0245] XTC comprising formulations are described, e.g., in U.S. Provisional Ser. No. 61/239,686, filed Sep. 3, 2009, which is hereby incorporated by reference.

[0246] MC3 comprising formulations are described, e.g., in U.S. Provisional Ser. No. 61/244,834, filed Sep. 22, 2009, and U.S. Provisional Ser. No. 61/185,800, filed Jun. 10, 2009, which are hereby incorporated by reference.

[0247] ALNY-100 comprising formulations are described, e.g., International patent application number PCT/US09/63933, filed on Nov. 10, 2009, which is hereby incorporated by reference.

[0248] Additional representative formulations delineated in Tables 25 and 26. Lipid refers to a cationic lipid.

TABLE 25
Composition of exemplary nucleic acid-lipid particle (mole %)
prepared via extrusion methods.

| Lipid | | | | |
|---|---|---|---|---|
| (mol %) | DSPC (mol %) | Chol (mol %) | PEG (mol %) | Lipid/siRNA |
| 20 | 30 | 40 | 10 | 2.13 |
| 20 | 30 | 40 | 10 | 2.35 |
| 20 | 30 | 40 | 10 | 2.37 |
| 20 | 30 | 40 | 10 | 3.23 |
| 20 | 30 | 40 | 10 | 3.91 |
| 30 | 20 | 40 | 10 | 2.89 |
| 30 | 20 | 40 | 10 | 3.34 |
| 30 | 20 | 40 | 10 | 3.34 |
| 30 | 20 | 40 | 10 | 4.10 |
| 30 | 20 | 40 | 10 | 5.64 |
| 40 | 10 | 40 | 10 | 3.02 |
| 40 | 10 | 40 | 10 | 3.35 |
| 40 | 10 | 40 | 10 | 3.74 |
| 40 | 10 | 40 | 10 | 5.80 |
| 40 | 10 | 40 | 10 | 8.00 |
| 45 | 5 | 40 | 10 | 3.27 |
| 45 | 5 | 40 | 10 | 3.30 |
| 45 | 5 | 40 | 10 | 4.45 |
| 45 | 5 | 40 | 10 | 7.00 |
| 45 | 5 | 40 | 10 | 9.80 |
| 50 | 0 | 40 | 10 | 27.03 |
| 20 | 35 | 40 | 5 | 3.00 |
| 20 | 35 | 40 | 5 | 3.32 |
| 20 | 35 | 40 | 5 | 3.05 |
| 20 | 35 | 40 | 5 | 3.67 |
| 20 | 35 | 40 | 5 | 4.71 |
| 30 | 25 | 40 | 5 | 2.47 |
| 30 | 25 | 40 | 5 | 2.98 |
| 30 | 25 | 40 | 5 | 3.29 |
| 30 | 25 | 40 | 5 | 4.99 |
| 30 | 25 | 40 | 5 | 7.15 |
| 40 | 15 | 40 | 5 | 2.79 |
| 40 | 15 | 40 | 5 | 3.29 |
| 40 | 15 | 40 | 5 | 4.33 |
| 40 | 15 | 40 | 5 | 7.05 |
| 40 | 15 | 40 | 5 | 9.63 |
| 45 | 10 | 40 | 5 | 2.44 |
| 45 | 10 | 40 | 5 | 3.21 |
| 45 | 10 | 40 | 5 | 4.29 |
| 45 | 10 | 40 | 5 | 6.50 |
| 45 | 10 | 40 | 5 | 8.67 |
| 20 | 35 | 40 | 5 | 4.10 |
| 20 | 35 | 40 | 5 | 4.83 |
| 30 | 25 | 40 | 5 | 3.86 |
| 30 | 25 | 40 | 5 | 5.38 |
| 30 | 25 | 40 | 5 | 7.07 |
| 40 | 15 | 40 | 5 | 3.85 |
| 40 | 15 | 40 | 5 | 4.88 |
| 40 | 15 | 40 | 5 | 7.22 |
| 40 | 15 | 40 | 5 | 9.75 |
| 45 | 10 | 40 | 5 | 2.83 |
| 45 | 10 | 40 | 5 | 3.85 |
| 45 | 10 | 40 | 5 | 4.88 |
| 45 | 10 | 40 | 5 | 7.05 |
| 45 | 10 | 40 | 5 | 9.29 |
| 45 | 20 | 30 | 5 | 4.01 |
| 45 | 20 | 30 | 5 | 3.70 |
| 50 | 15 | 30 | 5 | 4.75 |
| 50 | 15 | 30 | 5 | 3.80 |
| 55 | 10 | 30 | 5 | 3.85 |
| 55 | 10 | 30 | 5 | 4.13 |
| 60 | 5 | 30 | 5 | 5.09 |
| 60 | 5 | 30 | 5 | 4.67 |
| 65 | 0 | 30 | 5 | 4.75 |
| 65 | 0 | 30 | 5 | 6.06 |
| 56.5 | 10 | 30 | 3.5 | 3.70 |
| 56.5 | 10 | 30 | 3.5 | 3.56 |
| 57.5 | 10 | 30 | 2.5 | 3.48 |
| 57.5 | 10 | 30 | 2.5 | 3.20 |
| 58.5 | 10 | 30 | 1.5 | 3.24 |
| 58.5 | 10 | 30 | 1.5 | 3.13 |
| 59.5 | 10 | 30 | 0.5 | 3.24 |
| 59.5 | 10 | 30 | 0.5 | 3.03 |
| 45 | 10 | 40 | 5 | 7.57 |
| 45 | 10 | 40 | 5 | 7.24 |
| 45 | 10 | 40 | 5 | 7.48 |
| 45 | 10 | 40 | 5 | 7.84 |
| 65 | 0 | 30 | 5 | 4.01 |
| 60 | 5 | 30 | 5 | 3.70 |
| 55 | 10 | 30 | 5 | 3.65 |
| 50 | 10 | 35 | 5 | 3.43 |
| 50 | 15 | 30 | 5 | 3.80 |
| 45 | 15 | 35 | 5 | 3.70 |
| 45 | 20 | 30 | 5 | 3.75 |
| 45 | 25 | 25 | 5 | 3.85 |
| 55 | 10 | 32.5 | 2.5 | 3.61 |
| 60 | 10 | 27.5 | 2.5 | 3.65 |
| 60 | 10 | 25 | 5 | 4.07 |
| 55 | 5 | 38.5 | 1.5 | 3.75 |
| 60 | 10 | 28.5 | 1.5 | 3.43 |
| 55 | 10 | 33.5 | 1.5 | 3.48 |
| 60 | 5 | 33.5 | 1.5 | 3.43 |
| 55 | 5 | 37.5 | 2.5 | 3.75 |
| 60 | 5 | 32.5 | 2.5 | 4.52 |
| 60 | 5 | 32.5 | 2.5 | 3.52 |
| 45 | 15 (DMPC) | 35 | 5 | 3.20 |
| 45 | 15 (DPPC) | 35 | 5 | 3.43 |
| 45 | 15 (DOPC) | 35 | 5 | 4.52 |
| 45 | 15 (POPC) | 35 | 5 | 3.85 |
| 55 | 5 | 37.5 | 2.5 | 3.96 |
| 55 | 10 | 32.5 | 2.5 | 3.56 |
| 60 | 5 | 32.5 | 2.5 | 3.80 |
| 60 | 10 | 27.5 | 2.5 | 3.75 |
| 60 | 5 | 30 | 5 | 4.19 |
| 60 | 5 | 33.5 | 1.5 | 3.48 |
| 60 | 5 | 33.5 | 1.5 | 6.64 |
| 60 | 5 | 30 | 5 | 3.90 |
| 60 | 5 | 30 | 5 | 4.65 |
| 60 | 5 | 30 | 5 | 5.88 |
| 60 | 5 | 30 | 5 | 7.51 |
| 60 | 5 | 30 | 5 | 9.51 |
| 60 | 5 | 30 | 5 | 11.06 |
| 62.5 | 2.5 | 50 | 5 | 6.63 |
| 45 | 15 | 35 | 5 | 3.31 |
| 45 | 15 | 35 | 5 | 6.80 |
| 60 | 5 | 25 | 10 | 6.48 |
| 60 | 5 | 32.5 | 2.5 | 3.43 |
| 60 | 5 | 30 | 5 | 3.90 |
| 60 | 5 | 30 | 5 | 7.61 |
| 45 | 15 | 35 | 5 | 3.13 |
| 45 | 15 | 35 | 5 | 6.42 |
| 60 | 5 | 25 | 10 | 6.48 |
| 60 | 5 | 32.5 | 2.5 | 3.03 |
| 60 | 5 | 30 | 5 | 3.43 |
| 60 | 5 | 30 | 5 | 6.72 |
| 60 | 5 | 30 | 5 | 4.13 |
| 70 | 5 | 20 | 5 | 5.48 |
| 80 | 5 | 10 | 5 | 5.94 |
| 90 | 5 | 0 | 5 | 9.50 |
| 60 | 5 | 30 | 5 C12PEG | 3.85 |
| 60 | 5 | 30 | 5 | 3.70 |
| 60 | 5 | 30 | 5 C16PEG | 3.80 |
| 60 | 5 | 30 | 5 | 4.19 |
| 60 | 5 | 29 | 5 | 4.07 |
| 60 | 5 | 30 | 5 | 3.56 |
| 60 | 5 | 30 | 5 | 3.39 |
| 60 | 5 | 30 | 5 | 3.96 |
| 60 | 5 | 30 | 5 | 4.01 |
| 60 | 5 | 30 | 5 | 4.07 |
| 60 | 5 | 30 | 5 | 4.25 |
| 60 | 5 | 30 | 5 | 3.80 |
| 60 | 5 | 30 | 5 | 3.31 |
| 60 | 5 | 30 | 5 | 4.83 |
| 60 | 5 | 30 | 5 | 4.67 |
| 60 | 5 | 30 | 5 | 3.96 |
| 57.5 | 7.5 | 33.5 | 1.5 | 3.39 |
| 57.5 | 7.5 | 32.5 | 2.5 | 3.39 |
| 57.5 | 7.5 | 31.5 | 3.5 | 3.52 |
| 57.5 | 7.5 | 30 | 5 | 4.19 |
| 60 | 5 | 30 | 5 | 3.96 |
| 60 | 5 | 30 | 5 | 3.96 |
| 60 | 5 | 30 | 5 | 3.56 |
| 60 | 5 | 33.5 | 1.5 | 3.52 |
| 60 | 5 | 25 | 10 | 5.18 |
| 60 | 5 (DPPC) | 30 | 5 | 4.25 |
| 60 | 5 | 32.5 | 2.5 | 3.70 |
| 57.5 | 7.5 | 31.5 | 3.5 | 3.06 |
| 57.5 | 7.5 | 31.5 | 3.5 | 3.65 |
| 57.5 | 7.5 | 31.5 | 3.5 | 4.70 |
| 57.5 | 7.5 | 31.5 | 3.5 | 6.56 |

TABLE 26
Composition of exemplary nucleic acid-lipid particles prepared
via in-line mixing

| Lipid | DSPC | Chol | PEG | Lipid A/ |
|---|---|---|---|---|
| (mol %) | (mol %) | (mol %) | (mol %) | siRNA |
| 55 | 5 | 37.5 | 2.5 | 3.96 |
| 55 | 10 | 32.5 | 2.5 | 3.56 |
| 60 | 5 | 32.5 | 2.5 | 3.80 |
| 60 | 10 | 27.5 | 2.5 | 3.75 |
| 60 | 5 | 30 | 5 | 4.19 |
| 60 | 5 | 33.5 | 1.5 | 3.48 |
| 60 | 5 | 33.5 | 1.5 | 6.64 |
| 60 | 5 | 25 | 10 | 6.79 |
| 60 | 5 | 32.5 | 2.5 | 3.96 |
| 60 | 5 | 34 | 1 | 3.75 |
| 60 | 5 | 34.5 | 0.5 | 3.28 |
| 50 | 5 | 40 | 5 | 3.96 |
| 60 | 5 | 30 | 5 | 4.75 |
| 70 | 5 | 20 | 5 | 5.00 |
| 80 | 5 | 10 | 5 | 5.18 |
| 60 | 5 | 30 | 5 | 13.60 |
| 60 | 5 | 30 | 5 | 14.51 |
| 60 | 5 | 30 | 5 | 6.20 |
| 60 | 5 | 30 | 5 | 4.60 |
| 60 | 5 | 30 | 5 | 6.20 |
| 60 | 5 | 30 | 5 | 5.82 |
| 40 | 5 | 54 | 1 | 3.39 |
| 40 | 7.5 | 51.5 | 1 | 3.39 |
| 40 | 10 | 49 | 1 | 3.39 |
| 50 | 5 | 44 | 1 | 3.39 |
| 50 | 7.5 | 41.5 | 1 | 3.43 |
| 50 | 10 | 39 | 1 | 3.35 |
| 60 | 5 | 34 | 1 | 3.52 |
| 60 | 7.5 | 31.5 | 1 | 3.56 |
| 60 | 10 | 29 | 1 | 3.80 |
| 70 | 5 | 24 | 1 | 3.70 |
| 70 | 7.5 | 21.5 | 1 | 4.13 |
| 70 | 10 | 19 | 1 | 3.85 |
| 60 | 5 | 34 | 1 | 3.52 |
| 60 | 5 | 34 | 1 | 3.70 |
| 60 | 5 | 34 | 1 | 3.52 |
| 60 | 7.5 | 27.5 | 5 | 5.18 |
| 60 | 7.5 | 29 | 3.5 | 4.45 |
| 60 | 5 | 31.5 | 3.5 | 4.83 |
| 60 | 7.5 | 31 | 1.5 | 3.48 |
| 57.5 | 7.5 | 30 | 5 | 4.75 |
| 57.5 | 7.5 | 31.5 | 3.5 | 4.83 |
| 57.5 | 5 | 34 | 3.5 | 4.67 |
| 57.5 | 7.5 | 33.5 | 1.5 | 3.43 |
| 55 | 7.5 | 32.5 | 5 | 4.38 |
| 55 | 7.5 | 34 | 3.5 | 4.13 |
| 55 | 5 | 36.5 | 3.5 | 4.38 |
| 55 | 7.5 | 36 | 1.5 | 3.35 |

[0249] Synthesis of Cationic Lipids.

[0250] Any of the compounds, e.g., cationic lipids and the like, used in the nucleic acid-lipid particles of the invention may be prepared by known organic synthesis techniques, including the methods described in more detail in the Examples. All substituents are as defined below unless indicated otherwise.

[0251] “Alkyl” means a straight chain or branched, noncyclic or cyclic, saturated aliphatic hydrocarbon containing from 1 to 24 carbon atoms. Representative saturated straight chain alkyls include methyl, ethyl, n-propyl, n-butyl, n-pentyl, n-hexyl, and the like; while saturated branched alkyls include isopropyl, sec-butyl, isobutyl, tent-butyl, isopentyl, and the like. Representative saturated cyclic alkyls include cyclopropyl, cyclobutyl, cyclopentyl, cyclohexyl, and the like; while unsaturated cyclic alkyls include cyclopentenyl and cyclohexenyl, and the like.

[0252] “Alkenyl” means an alkyl, as defined above, containing at least one double bond between adjacent carbon atoms. Alkenyls include both cis and trans isomers. Representative straight chain and branched alkenyls include ethylenyl, propylenyl, 1-butenyl, 2-butenyl, isobutylenyl, 1-pentenyl, 2-pentenyl, 3-methyl-l-butenyl, 2-methyl-2-butenyl, 2,3-dimethyl-2-butenyl, and the like.

[0253] “Alkynyl” means any alkyl or alkenyl, as defined above, which additionally contains at least one triple bond between adjacent carbons. Representative straight chain and branched alkynyls include acetylenyl, propynyl, 1-butynyl, 2-butynyl, 1-pentynyl, 2-pentynyl, 3-methyl-1 butynyl, and the like.

[0254] “Acyl” means any alkyl, alkenyl, or alkynyl wherein the carbon at the point of attachment is substituted with an oxo group, as defined below. For example, —C(═O)alkyl, —C(═O)alkenyl, and —C(═O)alkynyl are acyl groups.

[0255] “Heterocycle” means a 5- to 7-membered monocyclic, or 7- to 10-membered bicyclic, heterocyclic ring which is either saturated, unsaturated, or aromatic, and which contains from 1 or 2 heteroatoms independently selected from nitrogen, oxygen and sulfur, and wherein the nitrogen and sulfur heteroatoms may be optionally oxidized, and the nitrogen heteroatom may be optionally quatermized, including bicyclic rings in which any of the above heterocycles are fused to a benzene ring. The heterocycle may be attached via any heteroatom or carbon atom. Heterocycles include heteroaryls as defined below. Heterocycles include morpholinyl, pyrrolidinonyl, pyrrolidinyl, piperidinyl, piperizynyl, hydantoinyl, valerolactamyl, oxiranyl, oxetanyl, tetrahydrofuranyl, tetrahydropyranyl, tetrahydropyridinyl, tetrahydroprimidinyl, tetrahydrothiophenyl, tetrahydrothiopyranyl, tetrahydropyrimidinyl, tetrahydrothiophenyl, tetrahydrothiopyranyl, and the like.

[0256] The terms “optionally substituted alkyl”, “optionally substituted alkenyl”, “optionally substituted alkynyl”, “optionally substituted acyl”, and “optionally substituted heterocycle” means that, when substituted, at least one hydrogen atom is replaced with a substituent. In the case of an oxo substituent (═O) two hydrogen atoms are replaced. In this regard, substituents include oxo, halogen, heterocycle, —CN, —OR^{x}, —NR^{x}R^{y}, —NR^{x}C(═O)R^{y}, —NR^{x}SO₂R^{y}, —C(═O)R^{x}, —C(═O)OR^{x}, —C(═O)NR^{x}R^{y}, —SOₙR^{x} and —SOₙNR^{x}R^{y}, wherein n is 0, 1 or 2, R^{x} and R^{y} are the same or different and independently hydrogen, alkyl or heterocycle, and each of said alkyl and heterocycle substituents may be further substituted with one or more of oxo, halogen, —OH, —CN, alkyl, —OR^{x}, heterocycle, —NR^{x}R^{y}, —NR^{x}C(═O)R^{y}, —NR^{x}SO₂R^{y}, —C(═O)R^{x}, —C(═O)OR^{x}, —C(═O)NR^{x}R^{y}, —SOₙR^{x} and —SOₙNR^{x}R^{y}.

[0257] “Halogen” means fluoro, chloro, bromo and iodo.

[0258] In some embodiments, the methods of the invention may require the use of protecting groups. Protecting group methodology is well known to those skilled in the art (see, for example, PROTECTIVE GROUPS IN ORGANIC SYNTHESIS, Green, T. W. et al., Wiley-Interscience, New York City, 1999). Briefly, protecting groups within the context of this invention are any group that reduces or eliminates unwanted reactivity of a functional group. A protecting group can be added to a functional group to mask its reactivity during certain reactions and then removed to reveal the original functional group. In some embodiments an “alcohol protecting group” is used. An “alcohol protecting group” is any group which decreases or eliminates unwanted reactivity of an alcohol functional group. Protecting groups can be added and removed using techniques well known in the art.

[0259] Synthesis of Formula A

[0260] In one embodiments, nucleic acid-lipid particles of the invention are formulated using a cationic lipid of formula A:

[chemical structure]

where R1 and R2 are independently alkyl, alkenyl or alkynyl, each can be optionally substituted, and R3 and R4 are independently lower alkyl or R3 and R4 can be taken together to form an optionally substituted heterocyclic ring. In some embodiments, the cationic lipid is XTC (2,2-Dilinoleyl-4-dimethylaminoethyl-[1,3]-dioxolane). In general, the lipid of formula A above may be made by the following Reaction Schemes 1 or 2, wherein all substituents are as defined above unless indicated otherwise.

[chemical structure]

[0261] Lipid A, where R₁ and R₂ are independently alkyl, alkenyl or alkynyl, each can be optionally substituted, and R₃ and R₄ are independently lower alkyl or R₃ and R₄ can be taken together to form an optionally substituted heterocyclic ring, can be prepared according to Scheme 1. Ketone 1 and bromide 2 can be purchased or prepared according to methods known to those of ordinary skill in the art. Reaction of 1 and 2 yields ketal 3. Treatment of ketal 3 with amine 4 yields lipids of formula A. The lipids of formula A can be converted to the corresponding ammonium salt with an organic salt of formula 5, where X is anion counter ion selected from halogen, hydroxide, phosphate, sulfate, or the like.

[chemical structure]

[0262] Alternatively, the ketone 1 starting material can be prepared according to Scheme 2. Grignard reagent 6 and cyanide 7 can be purchased or prepared according to methods known to those of ordinary skill in the art. Reaction of 6 and 7 yields ketone 1. Conversion of ketone 1 to the corresponding lipids of formula A is as described in Scheme 1.

[0263] Synthesis of MC3

[0264] Preparation of DLin-M-C3-DMA (i.e., (6Z,9Z,28Z,31Z)-heptatriaconta-6,9,28,31-tetraen-19-yl 4-(dimethylamino)butanoate) was as follows. A solution of (6Z,9Z,28Z,31Z)-heptatriaconta-6,9,28,31-tetraen-19-ol (0.53 g), 4-N,N-dimethylaminobutyric acid hydrochloride (0.51 g), 4-N,N-dimethylaminopyridine (0.61 g) and 1-ethyl-3-(3-dimethylaminopropyl)carbodiimide hydrochloride (0.53 g) in dichloromethane (5 mL) was stirred at room temperature overnight. The solution was washed with dilute hydrochloric acid followed by dilute aqueous sodium bicarbonate. The organic fractions were dried over anhydrous magnesium sulphate, filtered and the solvent removed on a rotovap. The residue was passed down a silica gel column (20 g) using a 1-5% methanol/dichloromethane elution gradient.

[0265] Fractions containing the purified product were combined and the solvent removed, yielding a colorless oil (0.54 g).

[0266] Synthesis of ALNY-100

[0267] Synthesis of ketal 519 [ALNY-100] was performed using the following scheme 3:

[chemical structure]

[0268] Synthesis of 515:

[0269] To a stirred suspension of LiAlH4 (3.74 g, 0.09852 mol) in 200 ml anhydrous THF in a two neck RBF (1 L), was added a solution of 514 (10 g, 0.04926 mol) in 70 mL of THF slowly at 0 0 C under nitrogen atmosphere. After complete addition, reaction mixture was warmed to room temperature and then heated to reflux for 4 h. Progress of the reaction was monitored by TLC. After completion of reaction (by TLC) the mixture was cooled to 0 0 C and quenched with careful addition of saturated Na2SO4 solution. Reaction mixture was stirred for 4 h at room temperature and filtered off. Residue was washed well with THF. The filtrate and washings were mixed and diluted with 400 mL dioxane and 26 mL conc. HCl and stirred for 20 minutes at room temperature. The volatilities were stripped off under vacuum to furnish the hydrochloride salt of 515 as a white solid. Yield: 7.12 g 1H-NMR (DMSO, 400 MHz): δ=9.34 (broad, 2H), 5.68 (s, 2H), 3.74 (m, 1H), 2.66-2.60 (m, 2H), 2.50-2.45 (m, 5H).

[0270] Synthesis of 516:

[0271] To a stirred solution of compound 515 in 100 mL dry DCM in a 250 mL two neck RBF, was added NEt3 (37.2 mL, 0.2669 mol) and cooled to 0 0 C under nitrogen atmosphere. After a slow addition of N-(benzyloxy-carbonyloxy)-succinimide (20 g, 0.08007 mol) in 50 mL dry DCM, reaction mixture was allowed to warm to room temperature. After completion of the reaction (2-3 h by TLC) mixture was washed successively with 1N HCl solution (1×100 mL) and saturated NaHCO3 solution (1×50 mL). The organic layer was then dried over anhyd. Na2SO4 and the solvent was evaporated to give crude material which was purified by silica gel column chromatography to get 516 as sticky mass. Yield: 11 g (89%). 1H-NMR (CDCl3, 400 MHz): δ=7.36-7.27(m, 5H), 5.69 (s, 2H), 5.12 (s, 2H), 4.96 (br., 1H) 2.74 (s, 3H), 2.60(m, 2H), 2.30-2.25(m, 2H). LC-MS [M+H]−232.3 (96.94%).

[0272] Synthesis of 517A and 517B:

[0273] The cyclopentene 516 (5 g, 0.02164 mol) was dissolved in a solution of 220 mL acetone and water (10:1) in a single neck 500 mL RBF and to it was added N-methyl morpholine-N-oxide (7.6 g, 0.06492 mol) followed by 4.2 mL of 7.6% solution of OsO4 (0.275 g, 0.00108 mol) in tert-butanol at room temperature. After completion of the reaction (˜3 h), the mixture was quenched with addition of solid Na2SO3 and resulting mixture was stirred for 1.5 h at room temperature. Reaction mixture was diluted with DCM (300 mL) and washed with water (2×100 mL) followed by saturated NaHCO3 (1×50 mL) solution, water (1×30 mL) and finally with brine (1×50 mL). Organic phase was dried over an Na2SO4 and solvent was removed in vacuum. Silica gel column chromatographic purification of the crude material was afforded a mixture of diastereomers, which were separated by prep HPLC. Yield: −6 g crude

[0274] 517A—Peak-1 (white solid), 5.13 g (96%). 1H-NMR (DMSO, 400 MHz): δ=7.39-7.31(m, 5H), 5.04(s, 2H), 4.78-4.73 (m, 1H), 4.48-4.47(d, 2H), 3.94-3.93(m, 2H), 2.71(s, 3H), 1.72-1.67(m, 4H). LC-MS−[M+H]−266.3, [M+NH4+]−283.5 present, HPLC-97.86%. Stereochemistry confirmed by X-ray.

[0275] Synthesis of 518:

[0276] Using a procedure analogous to that described for the synthesis of compound 505, compound 518 (1.2 g, 41%) was obtained as a colorless oil. 1H-NMR (CDC13, 400MHz): δ=7.35-7.33(m, 4H), 7.30-7.27(m, 1H), 5.37-5.27(m, 8H), 5.12(s, 2H), 4.75(m,1H), 4.58-4.57(m,2H), 2.78-2.74(m,7H), 2.06-2.00(m,8H), 1.96-1.91(m, 2H), 1.62(m, 4H), 1.48(m, 2H), 1.37-1.25(br m, 36H), 0.87(m, 6H). HPLC-98.65%.

[0277] General Procedure for the Synthesis of Compound 519:

[0278] A solution of compound 518 (1 eq) in hexane (15 mL) was added in a drop-wise fashion to an ice-cold solution of LAH in THF (1 M, 2 eq). After complete addition, the mixture was heated at 40 C over 0.5 h then cooled again on an ice bath. The mixture was carefully hydrolyzed with saturated aqueous Na2SO4 then filtered through celite and reduced to an oil. Column chromatography provided the pure 519 (1.3 g, 68%) which was obtained as a colorless oil. 13C NMR=130.2, 130.1 (x2), 127.9 (x3), 112.3, 79.3, 64.4, 44.7, 38.3, 35.4, 31.5, 29.9 (x2), 29.7, 29.6 (x2), 29.5 (x3), 29.3 (x2), 27.2 (x3), 25.6, 24.5, 23.3, 226, 14.1; Electrospray MS (+ve): Molecular weight for C44H80NO2 (M+H)+Calc. 654.6, Found 654.6.

[0279] Therapeutic Agent-Lipid Particle Compositions and Formulations

[0280] The invention includes compositions comprising a lipid particle of the invention and an active agent, wherein the active agent is associated with the lipid particle. In particular embodiments, the active agent is a therapeutic agent. In particular embodiments, the active agent is encapsulated within an aqueous interior of the lipid particle. In other embodiments, the active agent is present within one or more lipid layers of the lipid particle. In other embodiments, the active agent is bound to the exterior or interior lipid surface of a lipid particle.

[0281] “Fully encapsulated” as used herein indicates that the nucleic acid in the particles is not significantly degraded after exposure to serum or a nuclease assay that would significantly degrade free DNA. In a fully encapsulated system, preferably less than 25% of particle nucleic acid is degraded in a treatment that would normally degrade 100% of free nucleic acid, more preferably less than 10% and most preferably less than 5% of the particle nucleic acid is degraded. Alternatively, full encapsulation may be determined by an Oligreen® assay. Oligreen® is an ultra-sensitive fluorescent nucleic acid stain for quantitating oligonucleotides and single-stranded DNA in solution (available from Invitrogen Corporation, Carlsbad, Calif.). Fully encapsulated also suggests that the particles are serum stable, that is, that they do not rapidly decompose into their component parts upon in vivo administration.

[0282] Active agents, as used herein, include any molecule or compound capable of exerting a desired effect on a cell, tissue, organ, or subject. Such effects may be biological, physiological, or cosmetic, for example. Active agents may be any type of molecule or compound, including e.g., nucleic acids, peptides and polypeptides, including, e.g., antibodies, such as, e.g., polyclonal antibodies, monoclonal antibodies, antibody fragments; humanized antibodies, recombinant antibodies, recombinant human antibodies, and PrimatizedTM antibodies, cytokines, growth factors, apoptotic factors, differentiation-inducing factors, cell surface receptors and their ligands; hormones; and small molecules, including small organic molecules or compounds.

[0283] In one embodiment, the active agent is a therapeutic agent, or a salt or derivative thereof. Therapeutic agent derivatives may be therapeutically active themselves or they may be prodrugs, which become active upon further modification. Thus, in one embodiment, a therapeutic agent derivative retains some or all of the therapeutic activity as compared to the unmodified agent, while in another embodiment, a therapeutic agent derivative lacks therapeutic activity.

[0284] In various embodiments, therapeutic agents include any therapeutically effective agent or drug, such as anti-inflammatory compounds, anti-depressants, stimulants, analgesics, antibiotics, birth control medication, antipyretics, vasodilators, anti-angiogenics, cytovascular agents, signal transduction inhibitors, cardiovascular drugs, e.g., anti-arrhythmic agents, vasoconstrictors, hormones, and steroids.

[0285] In certain embodiments, the therapeutic agent is an oncology drug, which may also be referred to as an anti-tumor drug, an anti-cancer drug, a tumor drug, an antineoplastic agent, or the like. Examples of oncology drugs that may be used according to the invention include, but are not limited to, adriamycin, alkeran, allopurinol, altretamine, amifostine, anastrozole, araC, arsenic trioxide, azathioprine, bexarotene, biCNU, bleomycin, busulfan intravenous, busulfan oral, capecitabine (Xeloda), carboplatin, carmustine, CCNU, celecoxib, chlorambucil, cisplatin, cladribine, cyclosporin A, cytarabine, cytosine arabinoside, daunorubicin, cytoxan, daunorubicin, dexamethasone, dexrazoxane, dodetaxel, doxorubicin, doxorubicin, DTIC, epirubicin, estramustine, etoposide phosphate, etoposide and VP-16, exemestane, FK506, fludarabine, fluorouracil, 5-FU, gemcitabine (Gemzar), gemtuzumab-ozogamicin, goserelin acetate, hydrea, hydroxyurea, idarubicin, ifosfamide, imatinib mesylate, interferon, irinotecan (Camptostar, CPT-111), letrozole, leucovorin, leustatin, leuprolide, levamisole, litretinoin, megastrol, melphalan, L-PAM, mesna, methotrexate, methoxsalen, mithramycin, mitomycin, mitoxantrone, nitrogen mustard, paclitaxel, pamidronate, Pegademase, pentostatin, porfimer sodium, prednisone, rituxan, streptozocin, STI-571, tamoxifen, taxotere, temozolamide, teniposide, VM-26, topotecan (Hycamtin), toremifene, tretinoin, ATRA, valrubicin, velban, vinblastine, vincristine, VP16, and vinorelbine. Other examples of oncology drugs that may be used according to the invention are ellipticin and ellipticin analogs or derivatives, epothilones, intracellular kinase inhibitors and camptothecins.

[0286] Additional Formulations

[0287] Emulsions

[0288] The compositions of the present invention may be prepared and formulated as emulsions. Emulsions are typically heterogeneous systems of one liquid dispersed in another in the form of droplets usually exceeding 0.1 μm in diameter (Idson, in Pharmaceutical Dosage Forms, Lieberman, Rieger and Banker (Eds.), 1988, Marcel Dekker, Inc., New York, N.Y., volume 1, p. 199; Rosoff, in Pharmaceutical Dosage Forms, Lieberman, Rieger and Banker (Eds.), 1988, Marcel Dekker, Inc., New York, N.Y., Volume 1, p. 245; Block in Pharmaceutical Dosage Forms, Lieberman, Rieger and Banker (Eds.), 1988, Marcel Dekker, Inc., New York, N.Y., volume 2, p. 335; Higuchi et al., in Remington's Pharmaceutical Sciences, Mack Publishing Co., Easton, Pa., 1985, p. 301). Emulsions are often biphasic systems comprising two immiscible liquid phases intimately mixed and dispersed with each other. In general, emulsions may be of either the water-in-oil (w/o) or the oil-in-water (o/w) variety. When an aqueous phase is finely divided into and dispersed as minute droplets into a bulk oily phase, the resulting composition is called a water-in-oil (w/o) emulsion. Alternatively, when an oily phase is finely divided into and dispersed as minute droplets into a bulk aqueous phase, the resulting composition is called an oil-in-water (o/w) emulsion. Emulsions may contain additional components in addition to the dispersed phases, and the active drug which may be present as a solution in either the aqueous phase, oily phase or itself as a separate phase. Pharmaceutical excipients such as emulsifiers, stabilizers, dyes, and anti-oxidants may also be present in emulsions as needed. Pharmaceutical emulsions may also be multiple emulsions that are comprised of more than two phases such as, for example, in the case of oil-in-water-in-oil (o/w/o) and water-in-oil-in-water (w/o/w) emulsions. Such complex formulations often provide certain advantages that simple binary emulsions do not. Multiple emulsions in which individual oil droplets of an o/w emulsion enclose small water droplets constitute a w/o/w emulsion. Likewise a system of oil droplets enclosed in globules of water stabilized in an oily continuous phase provides an o/w/o emulsion.

[0289] Emulsions are characterized by little or no thermodynamic stability. Often, the dispersed or discontinuous phase of the emulsion is well dispersed into the external or continuous phase and maintained in this form through the means of emulsifiers or the viscosity of the formulation. Either of the phases of the emulsion may be a semisolid or a solid, as is the case of emulsion-style ointment bases and creams. Other means of stabilizing emulsions entail the use of emulsifiers that may be incorporated into either phase of the emulsion. Emulsifiers may broadly be classified into four categories: synthetic surfactants, naturally occurring emulsifiers, absorption bases, and finely dispersed solids (Idson, in Pharmaceutical Dosage Forms, Lieberman, Rieger and Banker (Eds.), 1988, Marcel Dekker, Inc., New York, N.Y., volume 1, p. 199).

[0290] Synthetic surfactants, also known as surface active agents, have found wide applicability in the formulation of emulsions and have been reviewed in the literature (Rieger, in Pharmaceutical Dosage Forms, Lieberman, Rieger and Banker (Eds.), 1988, Marcel Dekker, Inc., New York, N.Y., volume 1, p. 285; Idson, in Pharmaceutical Dosage Forms, Lieberman, Rieger and Banker (Eds.), Marcel Dekker, Inc., New York, N.Y., 1988, volume 1, p. 199). Surfactants are typically amphiphilic and comprise a hydrophilic and a hydrophobic portion. The ratio of the hydrophilic to the hydrophobic nature of the surfactant has been termed the hydrophile/lipophile balance (HLB) and is a valuable tool in categorizing and selecting surfactants in the preparation of formulations. Surfactants may be classified into different classes based on the nature of the hydrophilic group: nonionic, anionic, cationic and amphoteric (Rieger, in Pharmaceutical Dosage Forms, Lieberman, Rieger and Banker (Eds.), 1988, Marcel Dekker, Inc., New York, N.Y., volume 1, p. 285).

[0291] Naturally occurring emulsifiers used in emulsion formulations include lanolin, beeswax, phosphatides, lecithin and acacia. Absorption bases possess hydrophilic properties such that they can soak up water to form w/o emulsions yet retain their semisolid consistencies, such as anhydrous lanolin and hydrophilic petrolatum. Finely divided solids have also been used as good emulsifiers especially in combination with surfactants and in viscous preparations. These include polar inorganic solids, such as heavy metal hydroxides, non-swelling clays such as bentonite, attapulgite, hectorite, kaolin, montmorillonite, colloidal aluminum silicate and colloidal magnesium aluminum silicate, pigments and nonpolar solids such as carbon or glyceryl tristearate.

[0292] A large variety of non-emulsifying materials are also included in emulsion formulations and contribute to the properties of emulsions. These include fats, oils, waxes, fatty acids, fatty alcohols, fatty esters, humectants, hydrophilic colloids, preservatives and antioxidants (Block, in Pharmaceutical Dosage Forms, Lieberman, Rieger and Banker (Eds.), 1988, Marcel Dekker, Inc., New York, N.Y., volume 1, p. 335; Idson, in Pharmaceutical Dosage Forms, Lieberman, Rieger and Banker (Eds.), 1988, Marcel Dekker, Inc., New York, N.Y., volume 1, p. 199).

[0293] Hydrophilic colloids or hydrocolloids include naturally occurring gums and synthetic polymers such as polysaccharides (for example, acacia, agar, alginic acid, carrageenan, guar gum, karaya gum, and tragacanth), cellulose derivatives (for example, carboxymethylcellulose and carboxypropylcellulose), and synthetic polymers (for example, carbomers, cellulose ethers, and carboxyvinyl polymers). These disperse or swell in water to form colloidal solutions that stabilize emulsions by forming strong interfacial films around the dispersed-phase droplets and by increasing the viscosity of the external phase.

[0294] Since emulsions often contain a number of ingredients such as carbohydrates, proteins, sterols and phosphatides that may readily support the growth of microbes, these formulations often incorporate preservatives. Commonly used preservatives included in emulsion formulations include methyl paraben, propyl paraben, quaternary ammonium salts, benzalkonium chloride, esters of p-hydroxybenzoic acid, and boric acid. Antioxidants are also commonly added to emulsion formulations to prevent deterioration of the formulation. Antioxidants used may be free radical scavengers such as tocopherols, alkyl gallates, butylated hydroxyanisole, butylated hydroxytoluene, or reducing agents such as ascorbic acid and sodium metabisulfite, and antioxidant synergists such as citric acid, tartaric acid, and lecithin.

[0295] The application of emulsion formulations via dermatological, oral and parenteral routes and methods for their manufacture have been reviewed in the literature (Idson, in Pharmaceutical Dosage Forms, Lieberman, Rieger and Banker (Eds.), 1988, Marcel Dekker, Inc., New York, N.Y., volume 1, p. 199). Emulsion formulations for oral delivery have been very widely used because of ease of formulation, as well as efficacy from an absorption and bioavailability standpoint (Rosoff, in Pharmaceutical Dosage Forms, Lieberman, Rieger and Banker (Eds.), 1988, Marcel Dekker, Inc., New York, N.Y., volume 1, p. 245; Idson, in Pharmaceutical Dosage Forms, Lieberman, Rieger and Banker (Eds.), 1988, Marcel Dekker, Inc., New York, N.Y., volume 1, p. 199). Mineral-oil base laxatives, oil-soluble vitamins and high fat nutritive preparations are among the materials that have commonly been administered orally as o/w emulsions.

[0296] In one embodiment of the present invention, the compositions of dsRNAs and nucleic acids are formulated as microemulsions. A microemulsion may be defined as a system of water, oil and amphiphile which is a single optically isotropic and thermodynamically stable liquid solution (Rosoff, in Pharmaceutical Dosage Forms, Lieberman, Rieger and Banker (Eds.), 1988, Marcel Dekker, Inc., New York, N.Y., volume 1, p. 245). Typically microemulsions are systems that are prepared by first dispersing an oil in an aqueous surfactant solution and then adding a sufficient amount of a fourth component, generally an intermediate chain-length alcohol to form a transparent system. Therefore, microemulsions have also been described as thermodynamically stable, isotropically clear dispersions of two immiscible liquids that are stabilized by interfacial films of surface-active molecules (Leung and Shah, in: Controlled Release of Drugs: Polymers and Aggregate Systems, Rosoff, M., Ed., 1989, VCH Publishers, New York, pages 185-215). Microemulsions commonly are prepared via a combination of three to five components that include oil, water, surfactant, cosurfactant and electrolyte. Whether the microemulsion is of the water-in-oil (w/o) or an oil-in-water (o/w) type is dependent on the properties of the oil and surfactant used and on the structure and geometric packing of the polar heads and hydrocarbon tails of the surfactant molecules (Schott, in Remington's Pharmaceutical Sciences, Mack Publishing Co., Easton, Pa., 1985, p. 271).

[0297] The phenomenological approach utilizing phase diagrams has been extensively studied and has yielded a comprehensive knowledge, to one skilled in the art, of how to formulate microemulsions (Rosoff, in Pharmaceutical Dosage Forms, Lieberman, Rieger and Banker (Eds.), 1988, Marcel Dekker, Inc., New York, N.Y., volume 1, p. 245; Block, in Pharmaceutical Dosage Forms, Lieberman, Rieger and Banker (Eds.), 1988, Marcel Dekker, Inc., New York, N.Y., volume 1, p. 335). Compared to conventional emulsions, microemulsions offer the advantage of solubilizing water-insoluble drugs in a formulation of thermodynamically stable droplets that are formed spontaneously.

[0298] Surfactants used in the preparation of microemulsions include, but are not limited to, ionic surfactants, non-ionic surfactants, Brij 96, polyoxyethylene oleyl ethers, polyglycerol fatty acid esters, tetraglycerol monolaurate (ML310), tetraglycerol monooleate (M0310), hexaglycerol monooleate (P0310), hexaglycerol pentaoleate (P0500), decaglycerol monocaprate (MCA750), decaglycerol monooleate (M0750), decaglycerol sequioleate (S0750), decaglycerol decaoleate (DA0750), alone or in combination with cosurfactants. The cosurfactant, usually a short-chain alcohol such as ethanol, 1-propanol, and 1-butanol, serves to increase the interfacial fluidity by penetrating into the surfactant film and consequently creating a disordered film because of the void space generated among surfactant molecules. Microemulsions may, however, be prepared without the use of cosurfactants and alcohol-free self-emulsifying microemulsion systems are known in the art. The aqueous phase may typically be, but is not limited to, water, an aqueous solution of the drug, glycerol, PEG300, PEG400, polyglycerols, propylene glycols, and derivatives of ethylene glycol. The oil phase may include, but is not limited to, materials such as Captex 300, Captex 355, Capmul MCM, fatty acid esters, medium chain (C8-C12) mono, di, and tri-glycerides, polyoxyethylated glyceryl fatty acid esters, fatty alcohols, polyglycolized glycerides, saturated polyglycolized C8-C10 glycerides, vegetable oils and silicone oil.

[0299] Microemulsions are particularly of interest from the standpoint of drug solubilization and the enhanced absorption of drugs. Lipid based microemulsions (both o/w and w/o) have been proposed to enhance the oral bioavailability of drugs, including peptides (Constantinides et al., Pharmaceutical Research, 1994, 11, 1385-1390; Ritschel, Meth. Find. Exp. Clin. Pharmacol., 1993, 13, 205). Microemulsions afford advantages of improved drug solubilization, protection of drug from enzymatic hydrolysis, possible enhancement of drug absorption due to surfactant-induced alterations in membrane fluidity and permeability, ease of preparation, ease of oral administration over solid dosage forms, improved clinical potency, and decreased toxicity (Constantinides et al., Pharmaceutical Research, 1994, 11, 1385; Ho et al., J. Pharm. Sci., 1996, 85, 138-143). Often microemulsions may form spontaneously when their components are brought together at ambient temperature. This may be particularly advantageous when formulating thermolabile drugs, peptides or dsRNAs. Microemulsions have also been effective in the transdermal delivery of active components in both cosmetic and pharmaceutical applications. It is expected that the microemulsion compositions and formulations of the present invention will facilitate the increased systemic absorption of dsRNAs and nucleic acids from the gastrointestinal tract, as well as improve the local cellular uptake of dsRNAs and nucleic acids.

[0300] Microemulsions of the present invention may also contain additional components and additives such as sorbitan monostearate (Grill 3), Labrasol, and penetration enhancers to improve the properties of the formulation and to enhance the absorption of the dsRNAs and nucleic acids of the present invention. Penetration enhancers used in the microemulsions of the present invention may be classified as belonging to one of five broad categories--surfactants, fatty acids, bile salts, chelating agents, and non-chelating non-surfactants (Lee et al., Critical Reviews in Therapeutic Drug Carrier Systems, 1991, p. 92). Each of these classes has been discussed above.

[0301] Penetration Enhancers

[0302] In one embodiment, the present invention employs various penetration enhancers to effect the efficient delivery of nucleic acids, particularly dsRNAs, to the skin of animals. Most drugs are present in solution in both ionized and nonionized forms. However, usually only lipid soluble or lipophilic drugs readily cross cell membranes. It has been discovered that even non-lipophilic drugs may cross cell membranes if the membrane to be crossed is treated with a penetration enhancer. In addition to aiding the diffusion of non-lipophilic drugs across cell membranes, penetration enhancers also enhance the permeability of lipophilic drugs.

[0303] Penetration enhancers may be classified as belonging to one of five broad categories, i.e., surfactants, fatty acids, bile salts, chelating agents, and non-chelating non-surfactants (Lee et al., Critical Reviews in Therapeutic Drug Carrier Systems, 1991, p.92). Each of the above mentioned classes of penetration enhancers are described below in greater detail.

[0304] Surfactants: In connection with the present invention, surfactants (or “surface-active agents”) are chemical entities which, when dissolved in an aqueous solution, reduce the surface tension of the solution or the interfacial tension between the aqueous solution and another liquid, with the result that absorption of dsRNAs through the mucosa is enhanced. In addition to bile salts and fatty acids, these penetration enhancers include, for example, sodium lauryl sulfate, polyoxyethylene-9-lauryl ether and polyoxyethylene-20-cetyl ether) (Lee et al., Critical Reviews in Therapeutic Drug Carrier Systems, 1991, p.92); and perfluorochemical emulsions, such as FC-43. Takahashi et al., J. Pharm. Pharmacol., 1988, 40, 252).

[0305] Fatty acids: Various fatty acids and their derivatives which act as penetration enhancers include, for example, oleic acid, lauric acid, capric acid (n-decanoic acid), myristic acid, palmitic acid, stearic acid, linoleic acid, linolenic acid, dicaprate, tricaprate, monoolein (1-monooleoyl-rac-glycerol), dilaurin, caprylic acid, arachidonic acid, glycerol 1-monocaprate, 1-dodecylazacycloheptan-2-one, acylcarnitines, acylcholines, C₁₋₁₀ alkyl esters thereof (e.g., methyl, isopropyl and t-butyl), and mono- and di-glycerides thereof (i.e., oleate, laurate, caprate, myristate, palmitate, stearate, linoleate, etc.) (Lee et al., Critical Reviews in Therapeutic Drug Carrier Systems, 1991, p.92; Muranishi, Critical Reviews in Therapeutic Drug Carrier Systems, 1990, 7, 1-33; El Hariri et al., J. Pharm. Pharmacol., 1992, 44, 651-654).

[0306] Bile salts: The physiological role of bile includes the facilitation of dispersion and absorption of lipids and fat-soluble vitamins (Brunton, Chapter 38 in: Goodman & Gilman's The Pharmacological Basis of Therapeutics, 9th Ed., Hardman et al. Eds., McGraw-Hill, New York, 1996, pp. 934-935). Various natural bile salts, and their synthetic derivatives, act as penetration enhancers. Thus the term “bile salts” includes any of the naturally occurring components of bile as well as any of their synthetic derivatives. Suitable bile salts include, for example, cholic acid (or its pharmaceutically acceptable sodium salt, sodium cholate), dehydrocholic acid (sodium dehydrocholate), deoxycholic acid (sodium deoxycholate), glucholic acid (sodium glucholate), glycholic acid (sodium glycocholate), glycodeoxycholic acid (sodium glycodeoxycholate), taurocholic acid (sodium taurocholate), taurodeoxycholic acid (sodium taurodeoxycholate), chenodeoxycholic acid (sodium chenodeoxycholate), ursodeoxycholic acid (UDCA), sodium tauro-24,25-dihydro-fusidate (STDHF), sodium glycodihydrofusidate and polyoxyethylene-9-lauryl ether (POE) (Lee et al., Critical Reviews in Therapeutic Drug Carrier Systems, 1991, page 92; Swinyard, Chapter 39 In: Remington's Pharmaceutical Sciences, 18th Ed., Gennaro, ed., Mack Publishing Co., Easton, Pa., 1990, pages 782-783; Muranishi, Critical Reviews in Therapeutic Drug Carrier Systems, 1990, 7, 1-33; Yamamoto et al., J. Pharm. Exp. Ther., 1992, 263, 25; Yamashita et al., J. Pharm. Sci., 1990, 79, 579-583).

[0307] Chelating Agents: Chelating agents, as used in connection with the present invention, can be defined as compounds that remove metallic ions from solution by forming complexes therewith, with the result that absorption of dsRNAs through the mucosa is enhanced. With regards to their use as penetration enhancers in the present invention, chelating agents have the added advantage of also serving as DNase inhibitors, as most characterized DNA nucleases require a divalent metal ion for catalysis and are thus inhibited by chelating agents (Jarrett, J. Chromatogr., 1993, 618, 315-339). Suitable chelating agents include but are not limited to disodium ethylenediaminetetraacetate (EDTA), citric acid, salicylates (e.g., sodium salicylate, 5-methoxysalicylate and homovanilate), N-acyl derivatives of collagen, laureth-9 and N-amino acyl derivatives of beta-diketones (enamines)(Lee et al., Critical Reviews in Therapeutic Drug Carrier Systems, 1991, page 92; Muranishi, Critical Reviews in Therapeutic Drug Carrier Systems, 1990, 7, 1-33; Buur et al., J. Control Rel., 1990, 14, 43-51).

[0308] Non-chelating non-surfactants: As used herein, non-chelating non-surfactant penetration enhancing compounds can be defined as compounds that demonstrate insignificant activity as chelating agents or as surfactants but that nonetheless enhance absorption of dsRNAs through the alimentary mucosa (Muranishi, Critical Reviews in Therapeutic Drug Carrier Systems, 1990, 7, 1-33). This class of penetration enhancers include, for example, unsaturated cyclic ureas, 1-alkyl- and 1-alkenylazacyclo-alkanone derivatives (Lee et al., Critical Reviews in Therapeutic Drug Carrier Systems, 1991, page 92); and non-steroidal anti-inflammatory agents such as diclofenac sodium, indomethacin and phenylbutazone (Yamashita et al., J. Pharm. Pharmacol., 1987, 39, 621-626).

[0309] Agents that enhance uptake of dsRNAs at the cellular level may also be added to the pharmaceutical and other compositions of the present invention. For example, cationic lipids, such as lipofectin (Junichi et al, U.S. Pat. No. 5,705,188), cationic glycerol derivatives, and polycationic molecules, such as polylysine (Lollo et al., PCT Application WO 97/30731), are also known to enhance the cellular uptake of dsRNAs.

[0310] Other agents may be utilized to enhance the penetration of the administered nucleic acids, including glycols such as ethylene glycol and propylene glycol, pyrrols such as 2-pyrrol, azones, and terpenes such as limonene and menthone.

[0311] Carriers

[0312] dsRNAs of the present invention can be formulated in a pharmaceutically acceptable carrier or diluent. A “pharmaceutically acceptable carrier” (also referred to herein as an “excipient”) is a pharmaceutically acceptable solvent, suspending agent, or any other pharmacologically inert vehicle. Pharmaceutically acceptable carriers can be liquid or solid, and can be selected with the planned manner of administration in mind so as to provide for the desired bulk, consistency, and other pertinent transport and chemical properties. Typical pharmaceutically acceptable carriers include, by way of example and not limitation: water; saline solution; binding agents (e.g., polyvinylpyrrolidone or hydroxypropyl methylcellulose); fillers (e.g., lactose and other sugars, gelatin, or calcium sulfate); lubricants (e.g., starch, polyethylene glycol, or sodium acetate); disintegrates (e.g., starch or sodium starch glycolate); and wetting agents (e.g., sodium lauryl sulfate).

[0313] Certain compositions of the present invention also incorporate carrier compounds in the formulation. As used herein, “carrier compound” or “carrier” can refer to a nucleic acid, or analog thereof, which is inert (i.e., does not possess biological activity per se) but is recognized as a nucleic acid by in vivo processes that reduce the bioavailability of a nucleic acid having biological activity by, for example, degrading the biologically active nucleic acid or promoting its removal from circulation. The co-administration of a nucleic acid and a carrier compound, typically with an excess of the latter substance, can result in a substantial reduction of the amount of nucleic acid recovered in the liver, kidney or other extra-circulatory reservoirs, presumably due to competition between the carrier compound and the nucleic acid for a common receptor. For example, the recovery of a partially phosphorothioate dsRNA in hepatic tissue can be reduced when it is co-administered with polyinosinic acid, dextran sulfate, polycytidic acid or 4-acetamido-4′isothiocyano-stilbene-2,2′-disulfonic acid (Miyao et al., DsRNA Res. Dev., 1995, 5, 115-121; Takakura et al., DsRNA & Nucl. Acid Drug Dev., 1996, 6, 177-183.

[0314] Excipients

[0315] In contrast to a carrier compound, a “pharmaceutical carrier” or “excipient” is a pharmaceutically acceptable solvent, suspending agent or any other pharmacologically inert vehicle for delivering one or more nucleic acids to an animal. The excipient may be liquid or solid and is selected, with the planned manner of administration in mind, so as to provide for the desired bulk, consistency, etc., when combined with a nucleic acid and the other components of a given pharmaceutical composition. Typical pharmaceutical carriers include, but are not limited to, binding agents (e.g., pregelatinized maize starch, polyvinylpyrrolidone or hydroxypropyl methylcellulose, etc.); fillers (e.g., lactose and other sugars, microcrystalline cellulose, pectin, gelatin, calcium sulfate, ethyl cellulose, polyacrylates or calcium hydrogen phosphate, etc.); lubricants (e.g., magnesium stearate, talc, silica, colloidal silicon dioxide, stearic acid, metallic stearates, hydrogenated vegetable oils, corn starch, polyethylene glycols, sodium benzoate, sodium acetate, etc.); disintegrants (e.g., starch, sodium starch glycolate, etc.); and wetting agents (e.g., sodium lauryl sulphate, etc).

[0316] Pharmaceutically acceptable organic or inorganic excipients suitable for non-parenteral administration which do not deleteriously react with nucleic acids can also be used to formulate the compositions of the present invention. Suitable pharmaceutically acceptable carriers include, but are not limited to, water, salt solutions, alcohols, polyethylene glycols, gelatin, lactose, amylose, magnesium stearate, talc, silicic acid, viscous paraffin, hydroxymethylcellulose, polyvinylpyrrolidone and the like.

[0317] Formulations for topical administration of nucleic acids may include sterile and non-sterile aqueous solutions, non-aqueous solutions in common solvents such as alcohols, or solutions of the nucleic acids in liquid or solid oil bases. The solutions may also contain buffers, diluents and other suitable additives. Pharmaceutically acceptable organic or inorganic excipients suitable for non-parenteral administration which do not deleteriously react with nucleic acids can be used.

[0318] Suitable pharmaceutically acceptable excipients include, but are not limited to, water, salt solutions, alcohol, polyethylene glycols, gelatin, lactose, amylose, magnesium stearate, talc, silicic acid, viscous paraffin, hydroxymethylcellulose, polyvinylpyrrolidone and the like.

[0319] Other Components

[0320] The compositions of the present invention may additionally contain other adjunct components conventionally found in pharmaceutical compositions, at their art-established usage levels. Thus, for example, the compositions may contain additional, compatible, pharmaceutically-active materials such as, for example, antipruritics, astringents, local anesthetics or anti-inflammatory agents, or may contain additional materials useful in physically formulating various dosage forms of the compositions of the present invention, such as dyes, flavoring agents, preservatives, antioxidants, opacifiers, thickening agents and stabilizers. However, such materials, when added, should not unduly interfere with the biological activities of the components of the compositions of the present invention. The formulations can be sterilized and, if desired, mixed with auxiliary agents, e.g., lubricants, preservatives, stabilizers, wetting agents, emulsifiers, salts for influencing osmotic pressure, buffers, colorings, flavorings and/or aromatic substances and the like which do not deleteriously interact with the nucleic acid(s) of the formulation.

[0321] Aqueous suspensions may contain substances which increase the viscosity of the suspension including, for example, sodium carboxymethylcellulose, sorbitol and/or dextran. The suspension may also contain stabilizers.

[0322] Combination Therapy

[0323] In one aspect, a composition of the invention can be used in combination therapy. The term “combination therapy” includes the administration of the subject compounds in further combination with other biologically active ingredients (such as, but not limited to, a second and different antineoplastic agent) and non-drug therapies (such as, but not limited to, surgery or radiation treatment). For instance, the compounds of the invention can be used in combination with other pharmaceutically active compounds, preferably compounds that are able to enhance the effect of the compounds of the invention. The compounds of the invention can be administered simultaneously (as a single preparation or separate preparation) or sequentially to the other drug therapy. In general, a combination therapy envisions administration of two or more drugs during a single cycle or course of therapy.

[0324] In one aspect of the invention, the subject compounds may be administered in combination with one or more separate agents that modulate protein kinases involved in various disease states. Examples of such kinases may include, but are not limited to: serine/threonine specific kinases, receptor tyrosine specific kinases and non-receptor tyrosine specific kinases. Serine/threonine kinases include mitogen activated protein kinases (MAPK), meiosis specific kinase (MEK), RAF and aurora kinase. Examples of receptor kinase families include epidermal growth factor receptor (EGFR) (e.g., HER2/neu, HER3, HER4, ErbB, ErbB2, ErbB3, ErbB4, Xmrk, DER, Let23); fibroblast growth factor (FGF) receptor (e.g. FGF-R1, GFF-R2/BEK/CEK3, FGF-R3/CEK2, FGF-R4/TKF, KGF-R); hepatocyte growth/scatter factor receptor (HGFR) (e.g., MET, RON, SEA, SEX); insulin receptor (e.g. IGFI-R); Eph (e.g. CEK5, CEK8, EBK, ECK, EEK, EHK-I, EHK-2, ELK, EPH, ERK, HEK, MDK2, MDK5, SEK); AxI (e.g. Mer/Nyk, Rse); RET; and platelet-derived growth factor receptor (PDGFR) (e.g. PDGFα-R, PDGβ-R, CSF1-R/FMS, SCF- R/C-KIT, VEGF-R/FLT, NEK/FLK1, FLT3/FLK2/STK-1). Non-receptor tyrosine kinase families include, but are not limited to, BCR-ABL (e.g. p43^{abl}, ARG); BTK (e.g. ITK/EMT, TEC); CSK, FAK, FPS, JAK, SRC, BMX, FER, CDK and SYK.

[0325] In another aspect of the invention, the subject compounds may be administered in combination with one or more agents that modulate non-kinase biological targets or processes. Such targets include histone deacetylases (HDAC), DNA methyltransferase (DNMT), heat shock proteins (e.g., HSP90), and proteosomes.

[0326] In one embodiment, subject compounds may be combined with antineoplastic agents (e.g. small molecules, monoclonal antibodies, antisense RNA, and fusion proteins) that inhibit one or more biological targets such as Zolinza, Tarceva, Iressa, Tykerb, Gleevec, Sutent, Sprycel, Nexavar, Sorafenib, CNF2024, RG108, BMS387032, Affmitak, Avastin, Herceptin, Erbitux, AG24322, PD325901 , ZD6474, PD 184322, Obatodax, ABT737 and AEE788. Such combinations may enhance therapeutic efficacy over efficacy achieved by any of the agents alone and may prevent or delay the appearance of resistant mutational variants.

[0327] In certain preferred embodiments, the compounds of the invention are administered in combination with a chemotherapeutic agent. Chemotherapeutic agents encompass a wide range of therapeutic treatments in the field of oncology. These agents are administered at various stages of the disease for the purposes of shrinking tumors, destroying remaining cancer cells left over after surgery, inducing remission, maintaining remission and/or alleviating symptoms relating to the cancer or its treatment. Examples of such agents include, but are not limited to, alkylating agents such as mustard gas derivatives (Mechlorethamine, cylophosphamide, chlorambucil, melphalan, ifosfamide), ethylenimines (thiotepa, hexamethylmelanine), Alkylsulfonates (Busulfan), Hydrazines and Triazines (Altretamine, Procarbazine, Dacarbazine and Temozolomide), Nitrosoureas (Carmustine, Lomustine and Streptozocin), Ifosfamide and metal salts (Carboplatin, Cisplatin, and Oxaliplatin); plant alkaloids such as Podophyllotoxins (Etoposide and Tenisopide), Taxanes (Paclitaxel and Docetaxel), Vinca alkaloids (Vincristine, Vinblastine, Vindesine and Vinorelbine), and Camptothecan analogs (Irinotecan and Topotecan); anti-tumor antibiotics such as Chromomycins (Dactinomycin and Plicamycin), Anthracyclines (Doxorubicin, Daunorubicin, Epirubicin, Mitoxantrone, Valrubicin and Idarubicin), and miscellaneous antibiotics such as Mitomycin, Actinomycin and Bleomycin; anti-metabolites such as folic acid antagonists (Methotrexate, Pemetrexed, Raltitrexed, Aminopterin), pyrimidine antagonists (5-Fluorouracil, Floxuridine, Cytarabine, Capecitabine, and Gemcitabine), purine antagonists (6-Mercaptopurine and 6-Thioguanine) and adenosine deaminase inhibitors (Cladribine, Fludarabine, Mercaptopurine, Clofarabine, Thioguanine, Nelarabine and Pentostatin); topoisomerase inhibitors such as topoisomerase I inhibitors (Ironotecan, topotecan) and topoisomerase II inhibitors (Amsacrine, etoposide, etoposide phosphate, teniposide); monoclonal antibodies (Alemtuzumab, Gemtuzumab ozogamicin, Rituximab, Trastuzumab, Ibritumomab Tioxetan, Cetuximab, Panitumumab, Tositumomab, Bevacizumab); and miscellaneous anti-neoplasties such as ribonucleotide reductase inhibitors (Hydroxyurea); adrenocortical steroid inhibitor (Mitotane); enzymes (Asparaginase and Pegaspargase); anti-microtubule agents (Estramustine); and retinoids (Bexarotene, Isotretinoin, Tretinoin (ATRA). In certain preferred embodiments, the compounds of the invention are administered in combination with a chemoprotective agent. Chemoprotective agents act to protect the body or minimize the side effects of chemotherapy. Examples of such agents include, but are not limited to, amfostine, mesna, and dexrazoxane.

[0328] In one aspect of the invention, the subject compounds are administered in combination with radiation therapy. Radiation is commonly delivered internally (implantation of radioactive material near cancer site) or externally from a machine that employs photon (x-ray or gamma-ray) or particle radiation. Where the combination therapy further comprises radiation treatment, the radiation treatment may be conducted at any suitable time so long as a beneficial effect from the co-action of the combination of the therapeutic agents and radiation treatment is achieved. For example, in appropriate cases, the beneficial effect is still achieved when the radiation treatment is temporally removed from the administration of the therapeutic agents, perhaps by days or even weeks.

[0329] It will be appreciated that compounds of the invention can be used in combination with an immunotherapeutic agent. One form of immunotherapy is the generation of an active systemic tumor-specific immune response of host origin by administering a vaccine composition at a site distant from the tumor. Various types of vaccines have been proposed, including isolated tumor-antigen vaccines and anti-idiotype vaccines. Another approach is to use tumor cells from the subject to be treated, or a derivative of such cells (reviewed by Schirmacher et al. (1995) J. Cancer Res. Clin. Oncol. 121 :487). In U.S. Pat. No. 5,484,596, Hanna Jr. et al. claim a method for treating a resectable carcinoma to prevent recurrence or metastases, comprising surgically removing the tumor, dispersing the cells with collagenase, irradiating the cells, and vaccinating the patient with at least three consecutive doses of about 10⁷ cells.

[0330] It will be appreciated that the compounds of the invention may advantageously be used in conjunction with one or more adjunctive therapeutic agents. Examples of suitable agents for adjunctive therapy include steroids, such as corticosteroids (amcinonide, betamethasone, betamethasone dipropionate, betamethasone valerate, budesonide, clobetasol, clobetasol acetate, clobetasol butyrate, clobetasol 17-propionate, cortisone, deflazacort, desoximetasone, diflucortolone valerate, dexamethasone, dexamethasone sodium phosphate, desonide, furoate, fluocinonide, fluocinolone acetonide, halcinonide, hydrocortisone, hydrocortisone butyrate, hydrocortisone sodium succinate, hydrocortisone valerate, methyl prednisolone, mometasone, prednicarbate, prednisolone, triamcinolone, triamcinolone acetonide, and halobetasol proprionate); a 5HTi agonist, such as a triptan (e.g. sumatriptan or naratriptan); an adenosine Al agonist; an EP ligand; an NMDA modulator, such as a glycine antagonist; a sodium channel blocker (e.g. lamotrigine); a substance P antagonist (e.g. an NKi antagonist); a cannabinoid; acetaminophen or phenacetin; a 5 -lipoxygenase inhibitor; a leukotriene receptor antagonist; a DMARD (e.g. methotrexate); gabapentin and related compounds; a tricyclic antidepressant (e.g. amitryptilline); a neurone stabilizing antiepileptic drug; a mono-aminergic uptake inhibitor (e.g. venlafaxine); a matrix metalloproteinase inhibitor; a nitric oxide synthase (NOS) inhibitor, such as an iNOS or an nNOS inhibitor; an inhibitor of the release, or action, of tumour necrosis factor a; an antibody therapy, such as a monoclonal antibody therapy; an antiviral agent, such as a nucleoside inhibitor (e.g. lamivudine) or an immune system modulator (e.g. interferon); an opioid analgesic; a local anaesthetic; a stimulant, including caffeine; an H2-antagonist (e.g. ranitidine); a proton pump inhibitor (e.g. omeprazole); an antacid (e.g. aluminium or magnesium hydroxide; an antiflatulent (e.g. simethicone); a decongestant (e.g. phenylephrine, phenylpropanolamine, pseudoephedrine, oxymetazoline, epinephrine, naphazoline, xylometazoline, propylhexedrine, or levo-desoxyephedrine); an antitussive (e.g. codeine, hydrocodone, carmiphen, carbetapentane, or dextramethorphan); a diuretic; or a sedating or non-sedating antihistamine.

[0331] The compounds of the invention can be co-administered with siRNA that target other genes. For example, a compound of the invention can be co-administered with an siRNA targeted to a c-Myc gene. In one example, AD-12115 can be co-administered with a c-Myc siRNA. Examples of c-Myc targeted siRNAs are disclosed in U.S. patent application Ser. No. 12/373,039 which is herein incorporated by reference.

[0332] Methods for Treating Diseases caused by Expression of the Eg5 and VEGF Genes

[0333] The invention relates in particular to the use of a composition containing at least two dsRNAs, one targeting an Eg5 gene, and one targeting a VEGF gene, for the treatment of a cancer, such as liver cancer, e.g., for inhibiting tumor growth and tumor metastasis. For example, a composition, such as pharmaceutical composition, may be used for the treatment of solid tumors, like intrahepatic tumors such as may occur in cancers of the liver. A composition containing a dsRNA targeting Eg5 and a dsRNA targeting VEGF may also be used to treat other tumors and cancers, such as breast cancer, lung cancer, head and neck cancer, brain cancer, abdominal cancer, colon cancer, colorectal cancer, esophagus cancer, gastrointestinal cancer, glioma, tongue cancer, neuroblastoma, osteosarcoma, ovarian cancer, pancreatic cancer, prostate cancer, retinoblastoma, Wilm's tumor, multiple myeloma and for the treatment of skin cancer, like melanoma, for the treatment of lymphomas and blood cancer. The invention further relates to the use of a composition containing an Eg5 dsRNA and a VEGF dsRNA for inhibiting accumulation of ascites fluid and pleural effusion in different types of cancer, e.g., liver cancer, breast cancer, lung cancer, head cancer, neck cancer, brain cancer, abdominal cancer, colon cancer, colorectal cancer, esophagus cancer, gastrointestinal cancer, glioma, tongue cancer, neuroblastoma, osteosarcoma, ovarian cancer, pancreatic cancer, prostate cancer, retinoblastoma, Wilm's tumor, multiple myeloma, skin cancer, melanoma, lymphomas and blood cancer. Owing to the inhibitory effects on Eg5 and VEGF expression, a composition according to the invention or a pharmaceutical composition prepared therefrom can enhance the quality of life.

[0334] In one embodiment, a patient having a tumor associated with AFP expression, or a tumor secreting AFP, e.g., a hepatoma or teratoma, is treated. In certain embodiments, the patient has a malignant teratoma, an endodermal sinus tumor (yolk sac carcinoma), a neuroblastoma, a hepatoblastoma, a heptocellular carcinoma, testicular cancer or ovarian cancer.

[0335] The invention furthermore relates to the use of a dsRNA or a pharmaceutical composition thereof, e.g., for treating cancer or for preventing tumor metastasis, in combination with other pharmaceuticals and/or other therapeutic methods, e.g., with known pharmaceuticals and/or known therapeutic methods, such as, for example, those which are currently employed for treating cancer and/or for preventing tumor metastasis. Preference is given to a combination with radiation therapy and chemotherapeutic agents, such as cisplatin, cyclophosphamide, 5-fluorouracil, adriamycin, daunorubicin or tamoxifen.

[0336] The invention can also be practiced by including with a specific RNAi agent, in combination with another anti-cancer chemotherapeutic agent, such as any conventional chemotherapeutic agent. The combination of a specific binding agent with such other agents can potentiate the chemotherapeutic protocol. Numerous chemotherapeutic protocols will present themselves in the mind of the skilled practitioner as being capable of incorporation into the method of the invention. Any chemotherapeutic agent can be used, including alkylating agents, antimetabolites, hormones and antagonists, radioisotopes, as well as natural products. For example, the compound of the invention can be administered with antibiotics such as doxorubicin and other anthracycline analogs, nitrogen mustards such as cyclophosphamide, pyrimidine analogs such as 5-fluorouracil, cisplatin, hydroxyurea, taxol and its natural and synthetic derivatives, and the like. As another example, in the case of mixed tumors, such as adenocarcinoma of the breast, where the tumors include gonadotropin-dependent and gonadotropin-independent cells, the compound can be administered in conjunction with leuprolide or goserelin (synthetic peptide analogs of LH-RH). Other antineoplastic protocols include the use of a tetracycline compound with another treatment modality, e.g., surgery, radiation, etc., also referred to herein as “adjunct antineoplastic modalities.” Thus, the method of the invention can be employed with such conventional regimens with the benefit of reducing side effects and enhancing efficacy.

[0337] Methods for Inhibiting Expression of the Eg5 Gene and the VEGF Gene

[0338] In yet another aspect, the invention provides a method for inhibiting the expression of the Eg5 gene and the VEGF gene in a mammal. The method includes administering a composition featured in the invention to the mammal such that expression of the target Eg5 gene and the target VEGF gene is silenced.

[0339] In one embodiment, a method for inhibiting Eg5 gene expression and VEGF gene expression includes administering a composition containing two different dsRNA molecules, one having a nucleotide sequence that is complementary to at least a part of an RNA transcript of the Eg5 gene and the other having a nucleotide sequence that is complementary to at least a part of an RNA transcript of the VEGF gene of the mammal to be treated. When the organism to be treated is a mammal such as a human, the composition may be administered by any means known in the art including, but not limited to oral or parenteral routes, including intravenous, intramuscular, subcutaneous, transdermal, airway (aerosol), nasal, rectal, and topical (including buccal and sublingual) administration. In preferred embodiments, the compositions are administered by intravenous infusion or injection.

[0340] Methods of Preparing Lipid Particles

[0341] The methods and compositions of the invention make use of certain cationic lipids, the synthesis, preparation and characterization of which is described below and in the accompanying Examples. In addition, the present invention provides methods of preparing lipid particles, including those associated with a therapeutic agent, e.g., a nucleic acid. In the methods described herein, a mixture of lipids is combined with a buffered aqueous solution of nucleic acid to produce an intermediate mixture containing nucleic acid encapsulated in lipid particles wherein the encapsulated nucleic acids are present in a nucleic acid/lipid ratio of about 3 wt % to about 25 wt %, preferably 5 to 15 wt %. The intermediate mixture may optionally be sized to obtain lipid-encapsulated nucleic acid particles wherein the lipid portions are unilamellar vesicles, preferably having a diameter of 30 to 150 nm, more preferably about 40 to 90 nm. The pH is then raised to neutralize at least a portion of the surface charges on the lipid-nucleic acid particles, thus providing an at least partially surface-neutralized lipid-encapsulated nucleic acid composition.

[0342] As described above, several of these cationic lipids are amino lipids that are charged at a pH below the pKₐ of the amino group and substantially neutral at a pH above the pKₐ. These cationic lipids are termed titratable cationic lipids and can be used in the formulations of the invention using a two-step process. First, lipid vesicles can be formed at the lower pH with titratable cationic lipids and other vesicle components in the presence of nucleic acids. In this manner, the vesicles will encapsulate and entrap the nucleic acids. Second, the surface charge of the newly formed vesicles can be neutralized by increasing the pH of the medium to a level above the pKₐ of the titratable cationic lipids present, i.e., to physiological pH or higher. Particularly advantageous aspects of this process include both the facile removal of any surface adsorbed nucleic acid and a resultant nucleic acid delivery vehicle which has a neutral surface. Liposomes or lipid particles having a neutral surface are expected to avoid rapid clearance from circulation and to avoid certain toxicities which are associated with cationic liposome preparations. Additional details concerning these uses of such titratable cationic lipids in the formulation of nucleic acid-lipid particles are provided in U.S. Pat. No. 6,287,591 and U.S. Pat. No. 6,858,225, incorporated herein by reference.

[0343] It is further noted that the vesicles formed in this manner provide formulations of uniform vesicle size with high content of nucleic acids. Additionally, the vesicles have a size range of from about 30 to about 150 nm, more preferably about 30 to about 90 nm.

[0344] Without intending to be bound by any particular theory, it is believed that the very high efficiency of nucleic acid encapsulation is a result of electrostatic interaction at low pH. At acidic pH (e.g. pH 4.0) the vesicle surface is charged and binds a portion of the nucleic acids through electrostatic interactions. When the external acidic buffer is exchanged for a more neutral buffer (e.g. pH 7.5) the surface of the lipid particle or liposome is neutralized, allowing any external nucleic acid to be removed. More detailed information on the formulation process is provided in various publications (e.g., U.S. Pat. No. 6,287,591 and U.S. Pat. No. 6,858,225).

[0345] In view of the above, the present invention provides methods of preparing lipid/nucleic acid formulations. In the methods described herein, a mixture of lipids is combined with a buffered aqueous solution of nucleic acid to produce an intermediate mixture containing nucleic acid encapsulated in lipid particles, e.g., wherein the encapsulated nucleic acids are present in a nucleic acid/lipid ratio of about 10 wt % to about 20 wt %. The intermediate mixture may optionally be sized to obtain lipid-encapsulated nucleic acid particles wherein the lipid portions are unilamellar vesicles, preferably having a diameter of 30 to 150 nm, more preferably about 40 to 90 nm. The pH is then raised to neutralize at least a portion of the surface charges on the lipid-nucleic acid particles, thus providing an at least partially surface-neutralized lipid-encapsulated nucleic acid composition.

[0346] In certain embodiments, the mixture of lipids includes at least two lipid components: a first amino lipid component of the present invention that is selected from among lipids which have a pKa such that the lipid is cationic at pH below the pKa and neutral at pH above the pKa, and a second lipid component that is selected from among lipids that prevent particle aggregation during lipid-nucleic acid particle formation. In particular embodiments, the amino lipid is a novel cationic lipid of the present invention.

[0347] In preparing the nucleic acid-lipid particles of the invention, the mixture of lipids is typically a solution of lipids in an organic solvent. This mixture of lipids can then be dried to form a thin film or lyophilized to form a powder before being hydrated with an aqueous buffer to form liposomes. Alternatively, in a preferred method, the lipid mixture can be solubilized in a water miscible alcohol, such as ethanol, and this ethanolic solution added to an aqueous buffer resulting in spontaneous liposome formation. In most embodiments, the alcohol is used in the form in which it is commercially available. For example, ethanol can be used as absolute ethanol (100%), or as 95% ethanol, the remainder being water. This method is described in more detail in U.S. Pat. No. 5,976,567).

[0348] In accordance with the invention, the lipid mixture is combined with a buffered aqueous solution that may contain the nucleic acids. The buffered aqueous solution of is typically a solution in which the buffer has a pH of less than the pKₐ of the protonatable lipid in the lipid mixture. Examples of suitable buffers include citrate, phosphate, acetate, and MES. A particularly preferred buffer is citrate buffer. Preferred buffers will be in the range of 1-1000 mM of the anion, depending on the chemistry of the nucleic acid being encapsulated, and optimization of buffer concentration may be significant to achieving high loading levels (see, e.g., U.S. Pat. No. 6,287,591 and U.S. Pat. No. 6,858,225). Alternatively, pure water acidified to pH 5-6 with chloride, sulfate or the like may be useful. In this case, it may be suitable to add 5% glucose, or another non-ionic solute which will balance the osmotic potential across the particle membrane when the particles are dialyzed to remove ethanol, increase the pH, or mixed with a pharmaceutically acceptable carrier such as normal saline. The amount of nucleic acid in buffer can vary, but will typically be from about 0.01 mg/mL to about 200 mg/mL, more preferably from about 0.5 mg/mL to about 50 mg/mL.

[0349] The mixture of lipids and the buffered aqueous solution of therapeutic nucleic acids is combined to provide an intermediate mixture. The intermediate mixture is typically a mixture of lipid particles having encapsulated nucleic acids. Additionally, the intermediate mixture may also contain some portion of nucleic acids which are attached to the surface of the lipid particles (liposomes or lipid vesicles) due to the ionic attraction of the negatively-charged nucleic acids and positively-charged lipids on the lipid particle surface (the amino lipids or other lipid making up the protonatable first lipid component are positively charged in a buffer having a pH of less than the pKₐ of the protonatable group on the lipid). In one group of preferred embodiments, the mixture of lipids is an alcohol solution of lipids and the volumes of each of the solutions is adjusted so that upon combination, the resulting alcohol content is from about 20% by volume to about 45% by volume. The method of combining the mixtures can include any of a variety of processes, often depending upon the scale of formulation produced. For example, when the total volume is about 10-20 mL or less, the solutions can be combined in a test tube and stirred together using a vortex mixer. Large-scale processes can be carried out in suitable production scale glassware.

[0350] Optionally, the lipid-encapsulated therapeutic agent (e.g., nucleic acid) complexes which are produced by combining the lipid mixture and the buffered aqueous solution of therapeutic agents (nucleic acids) can be sized to achieve a desired size range and relatively narrow distribution of lipid particle sizes. Preferably, the compositions provided herein will be sized to a mean diameter of from about 70 to about 200 nm, more preferably about 90 to about 130 nm. Several techniques are available for sizing liposomes to a desired size. One sizing method is described in U.S. Pat. No. 4,737,323, incorporated herein by reference. Sonicating a liposome suspension either by bath or probe sonication produces a progressive size reduction down to small unilamellar vesicles (SUVs) less than about 0.05 microns in size. Homogenization is another method which relies on shearing energy to fragment large liposomes into smaller ones. In a typical homogenization procedure, multilamellar vesicles are recirculated through a standard emulsion homogenizer until selected liposome sizes, typically between about 0.1 and 0.5 microns, are observed. In both methods, the particle size distribution can be monitored by conventional laser-beam particle size determination. For certain methods herein, extrusion is used to obtain a uniform vesicle size.

[0351] Extrusion of liposome compositions through a small-pore polycarbonate membrane or an asymmetric ceramic membrane results in a relatively well-defined size distribution. Typically, the suspension is cycled through the membrane one or more times until the desired liposome complex size distribution is achieved. The liposomes may be extruded through successively smaller-pore membranes, to achieve a gradual reduction in liposome size. In some instances, the lipid-nucleic acid compositions which are formed can be used without any sizing.

[0352] In particular embodiments, methods of the present invention further comprise a step of neutralizing at least some of the surface charges on the lipid portions of the lipid-nucleic acid compositions. By at least partially neutralizing the surface charges, unencapsulated nucleic acid is freed from the lipid particle surface and can be removed from the composition using conventional techniques. Preferably, unencapsulated and surface adsorbed nucleic acids are removed from the resulting compositions through exchange of buffer solutions. For example, replacement of a citrate buffer (pH about 4.0, used for forming the compositions) with a HEPES-buffered saline (HBS pH about 7.5) solution, results in the neutralization of liposome surface and nucleic acid release from the surface. The released nucleic acid can then be removed via chromatography using standard methods, and then switched into a buffer with a pH above the pKa of the lipid used.

[0353] Optionally the lipid vesicles (i.e., lipid particles) can be formed by hydration in an aqueous buffer and sized using any of the methods described above prior to addition of the nucleic acid. As described above, the aqueous buffer should be of a pH below the pKa of the amino lipid. A solution of the nucleic acids can then be added to these sized, preformed vesicles. To allow encapsulation of nucleic acids into such “pre-formed” vesicles the mixture should contain an alcohol, such as ethanol. In the case of ethanol, it should be present at a concentration of about 20% (w/w) to about 45% (w/w). In addition, it may be necessary to warm the mixture of pre-formed vesicles and nucleic acid in the aqueous buffer-ethanol mixture to a temperature of about 25° C. to about 50° C. depending on the composition of the lipid vesicles and the nature of the nucleic acid. It will be apparent to one of ordinary skill in the art that optimization of the encapsulation process to achieve a desired level of nucleic acid in the lipid vesicles will require manipulation of variable such as ethanol concentration and temperature. Examples of suitable conditions for nucleic acid encapsulation are provided in the Examples. Once the nucleic acids are encapsulated within the preformed vesicles, the external pH can be increased to at least partially neutralize the surface charge. Unencapsulated and surface adsorbed nucleic acids can then be removed as described above.

[0354] Method of Use

[0355] The lipid particles of the invention may be used to deliver a therapeutic agent to a cell, in vitro or in vivo. In particular embodiments, the therapeutic agent is a nucleic acid, which is delivered to a cell using a nucleic acid-lipid particles of the invention. While the following description of various methods of using the lipid particles and related pharmaceutical compositions of the invention are exemplified by description related to nucleic acid-lipid particles, it is understood that these methods and compositions may be readily adapted for the delivery of any therapeutic agent for the treatment of any disease or disorder that would benefit from such treatment.

[0356] In certain embodiments, the invention provides methods for introducing a nucleic acid into a cell. Preferred nucleic acids for introduction into cells are siRNA, immune-stimulating oligonucleotides, plasmids, antisense and ribozymes. These methods may be carried out by contacting the particles or compositions of the invention with the cells for a period of time sufficient for intracellular delivery to occur.

[0357] The compositions of the invention can be adsorbed to almost any cell type. Once adsorbed, the nucleic acid-lipid particles can either be endocytosed by a portion of the cells, exchange lipids with cell membranes, or fuse with the cells. Transfer or incorporation of the nucleic acid portion of the complex can take place via any one of these pathways. Without intending to be limited with respect to the scope of the invention, it is believed that in the case of particles taken up into the cell by endocytosis the particles then interact with the endosomal membrane, resulting in destabilization of the endosomal membrane, possibly by the formation of non-bilayer phases, resulting in introduction of the encapsulated nucleic acid into the cell cytoplasm. Similarly in the case of direct fusion of the particles with the cell plasma membrane, when fusion takes place, the liposome membrane is integrated into the cell membrane and the contents of the liposome combine with the intracellular fluid. Contact between the cells and the lipid-nucleic acid compositions, when carried out in vitro, will take place in a biologically compatible medium. The concentration of compositions can vary widely depending on the particular application, but is generally between about 1 μmol and about 10 mmol. In certain embodiments, treatment of the cells with the lipid-nucleic acid compositions will generally be carried out at physiological temperatures (about 37° C.) for periods of time from about 1 to 24 hours, preferably from about 2 to 8 hours. For in vitro applications, the delivery of nucleic acids can be to any cell grown in culture, whether of plant or animal origin, vertebrate or invertebrate, and of any tissue or type. In preferred embodiments, the cells will be animal cells, more preferably mammalian cells, and most preferably human cells.

[0358] In one group of embodiments, a lipid-nucleic acid particle suspension is added to 60-80% confluent plated cells having a cell density of from about 10³ to about 10⁵ cells/mL, more preferably about 2×10⁴ cells/mL. The concentration of the suspension added to the cells is preferably of from about 0.01 to 20 μg/mL, more preferably about 1 μg/mL.

[0359] Typical applications include using well known procedures to provide intracellular delivery of siRNA to knock down or silence specific cellular targets. Alternatively applications include delivery of DNA or mRNA sequences that code for therapeutically useful polypeptides. In this manner, therapy is provided for genetic diseases by supplying deficient or absent gene products (i.e., for Duchenne's dystrophy, see Kunkel, et al., Brit. Med. Bull. 45(3):630-643 (1989), and for cystic fibrosis, see Goodfellow, Nature 341:102-103 (1989)). Other uses for the compositions of the invention include introduction of antisense oligonucleotides in cells (see, Bennett, et al., Mol. Pharm. 41:1023-1033 (1992)).

[0360] Alternatively, the compositions of the invention can also be used for deliver of nucleic acids to cells in vivo, using methods which are known to those of skill in the art. With respect to application of the invention for delivery of DNA or mRNA sequences, Zhu, et al., Science 261:209-211 (1993), incorporated herein by reference, describes the intravenous delivery of cytomegalovirus (CMV)-chloramphenicol acetyltransferase (CAT) expression plasmid using DOTMA-DOPE complexes. Hyde, et al., Nature 362:250-256 (1993), incorporated herein by reference, describes the delivery of the cystic fibrosis transmembrane conductance regulator (CFTR) gene to epithelia of the airway and to alveoli in the lung of mice, using liposomes. Brigham, et al., Am. J. Med. Sci. 298:278-281 (1989), incorporated herein by reference, describes the in vivo transfection of lungs of mice with a functioning prokaryotic gene encoding the intracellular enzyme, chloramphenicol acetyltransferase (CAT). Thus, the compositions of the invention can be used in the treatment of infectious diseases.

[0361] For in vivo administration, the pharmaceutical compositions are preferably administered parenterally, i.e., intraarticularly, intravenously, intraperitoneally, subcutaneously, or intramuscularly. In particular embodiments, the pharmaceutical compositions are administered intravenously or intraperitoneally by a bolus injection. For one example, see Stadler, et al., U.S. Pat. No. 5,286,634, which is incorporated herein by reference. Intracellular nucleic acid delivery has also been discussed in Straubringer, et al., METHODS IN ENZYMOLOGY, Academic Press, New York. 101:512-527 (1983); Mannino, et al., Biotechniques 6:682-690 (1988); Nicolau, et al., Crit. Rev. Ther. Drug Carrier Syst. 6:239-271 (1989), and Behr, Acc. Chem. Res. 26:274-278 (1993). Still other methods of administering lipid-based therapeutics are described in, for example, Rahman et al., U.S. Pat. No. 3,993,754; Sears, U.S. Pat. No. 4,145,410; Papahadjopoulos et al., U.S. Pat. No. 4,235,871; Schneider, U.S. Pat. No. 4,224,179; Lenk et al., U.S. Pat. No. 4,522,803; and Fountain et al., U.S. Pat. No. 4,588,578.

[0362] In other methods, the pharmaceutical preparations may be contacted with the target tissue by direct application of the preparation to the tissue. The application may be made by topical, “open” or “closed” procedures. By “topical,” it is meant the direct application of the pharmaceutical preparation to a tissue exposed to the environment, such as the skin, oropharynx, external auditory canal, and the like. “Open” procedures are those procedures which include incising the skin of a patient and directly visualizing the underlying tissue to which the pharmaceutical preparations are applied. This is generally accomplished by a surgical procedure, such as a thoracotomy to access the lungs, abdominal laparotomy to access abdominal viscera, or other direct surgical approach to the target tissue. “Closed” procedures are invasive procedures in which the internal target tissues are not directly visualized, but accessed via inserting instruments through small wounds in the skin. For example, the preparations may be administered to the peritoneum by needle lavage. Likewise, the pharmaceutical preparations may be administered to the meninges or spinal cord by infusion during a lumbar puncture followed by appropriate positioning of the patient as commonly practiced for spinal anesthesia or metrazamide imaging of the spinal cord. Alternatively, the preparations may be administered through endoscopic devices.

[0363] The lipid-nucleic acid compositions can also be administered in an aerosol inhaled into the lungs (see, Brigham, et al., Am. J. Sci. 298(4):278-281 (1989)) or by direct injection at the site of disease (Culver, Human Gene Therapy, MaryAnn Liebert, Inc., Publishers, New York. pp. 70-71 (1994)).

[0364] The methods of the invention may be practiced in a variety of hosts. Preferred hosts include mammalian species, such as humans, non-human primates, dogs, cats, cattle, horses, sheep, and the like.

[0365] Dosages for the lipid-therapeutic agent particles of the invention will depend on the ratio of therapeutic agent to lipid and the administrating physician's opinion based on age, weight, and condition of the patient.

[0366] In one embodiment, the invention provides a method of modulating the expression of a target polynucleotide or polypeptide. These methods generally comprise contacting a cell with a lipid particle of the invention that is associated with a nucleic acid capable of modulating the expression of a target polynucleotide or polypeptide. As used herein, the term “modulating” refers to altering the expression of a target polynucleotide or polypeptide. In different embodiments, modulating can mean increasing or enhancing, or it can mean decreasing or reducing. Methods of measuring the level of expression of a target polynucleotide or polypeptide are known and available in the arts and include, e.g., methods employing reverse transcription-polymerase chain reaction (RT-PCR) and immunohistochemical techniques. In particular embodiments, the level of expression of a target polynucleotide or polypeptide is increased or reduced by at least 10%, 20%, 30%, 40%, 50%, or greater than 50% as compared to an appropriate control value. For example, if increased expression of a polypeptide desired, the nucleic acid may be an expression vector that includes a polynucleotide that encodes the desired polypeptide. On the other hand, if reduced expression of a polynucleotide or polypeptide is desired, then the nucleic acid may be, e.g., an antisense oligonucleotide, siRNA, or microRNA that comprises a polynucleotide sequence that specifically hybridizes to a polynucleotide that encodes the target polypeptide, thereby disrupting expression of the target polynucleotide or polypeptide. Alternatively, the nucleic acid may be a plasmid that expresses such an antisense oligonucleotide, siRNA, or microRNA.

[0367] In one particular embodiment, the invention provides a method of modulating the expression of a polypeptide by a cell, comprising providing to a cell a lipid particle that consists of or consists essentially of a cationic lipid of formula A, a neutral lipid, a sterol, a PEG of PEG-modified lipid, e.g., in a molar ratio of about 35-65% of cationic lipid of formula A, 3-12% of the neutral lipid, 15-45% of the sterol, and 0.5-10% of the PEG or PEG-modified lipid, wherein the lipid particle is associated with a nucleic acid capable of modulating the expression of the polypeptide. In particular embodiments, the molar lipid ratio is approximately 60/7.5/31/1.5 or 57.5/7.5/31.5/3.5 (mol % LIPID A/DSPC/Chol/PEG-DMG). In another group of embodiments, the neutral lipid in these compositions is replaced with DPPC (dipalmitoylphosphatidylcholine), POPC, DOPE or SM.

[0368] In particular embodiments, the therapeutic agent is selected from an siRNA, a microRNA, an antisense oligonucleotide, and a plasmid capable of expressing an siRNA, a microRNA, or an antisense oligonucleotide, and wherein the siRNA, microRNA, or antisense RNA comprises a polynucleotide that specifically binds to a polynucleotide that encodes the polypeptide, or a complement thereof, such that the expression of the polypeptide is reduced.

[0369] In other embodiments, the nucleic acid is a plasmid that encodes the polypeptide or a functional variant or fragment thereof, such that expression of the polypeptide or the functional variant or fragment thereof is increased.

[0370] In related embodiments, the invention provides a method of treating a disease or disorder characterized by overexpression of a polypeptide in a subject, comprising providing to the subject a pharmaceutical composition of the invention, wherein the therapeutic agent is selected from an siRNA, a microRNA, an antisense oligonucleotide, and a plasmid capable of expressing an siRNA, a microRNA, or an antisense oligonucleotide, and wherein the siRNA, microRNA, or antisense RNA comprises a polynucleotide that specifically binds to a polynucleotide that encodes the polypeptide, or a complement thereof.

[0371] In one embodiment, the pharmaceutical composition comprises a lipid particle that consists of or consists essentially of Lipid A, DSPC, Chol and PEG-DMG, PEG-C-DOMG or PEG-DMA, e.g., in a molar ratio of about 35-65% of cationic lipid of formula A, 3-12% of the neutral lipid, 15-45% of the sterol, and 0.5-10% of the PEG or PEG-modified lipid PEG-DMG, PEG-C-DOMG or PEG-DMA, wherein the lipid particle is associated with the therapeutic nucleic acid. In particular embodiments, the molar lipid ratio is approximately 60/7.5/31/1.5 or 57.5/7.5/31.5/3.5 (mol % LIPID A/DSPC/Chol/PEG-DMG). In another group of embodiments, the neutral lipid in these compositions is replaced with DPPC, POPC, DOPE or SM.

[0372] In another related embodiment, the invention includes a method of treating a disease or disorder characterized by underexpression of a polypeptide in a subject, comprising providing to the subject a pharmaceutical composition of the invention, wherein the therapeutic agent is a plasmid that encodes the polypeptide or a functional variant or fragment thereof.

[0373] Unless otherwise defined, all technical and scientific terms used herein have the same meaning as commonly understood by one of ordinary skill in the art to which this invention belongs. Although methods and materials similar or equivalent to those described herein can be used in the practice or testing of the invention, suitable methods and materials are described below. All publications, patent applications, patents, and other references mentioned herein are incorporated by reference in their entirety. In case of conflict, the present specification, including definitions, will control. In addition, the materials, methods, and examples are illustrative only and not intended to be limiting.

### Examples

### Example 1

### dsRNA Synthesis

[0374] Source of Reagents

[0375] Where the source of a reagent is not specifically given herein, such reagent may be obtained from any supplier of reagents for molecular biology at a quality/purity standard for application in molecular biology.

[0376] siRNA Synthesis

[0377] For screening of dsRNA, single-stranded RNAs were produced by solid phase synthesis on a scale of 1 μmole using an Expedite 8909 synthesizer (Applied Biosystems, Applera Deutschland GmbH, Darmstadt, Germany) and controlled pore glass (CPG, 500 Å, Proligo Biochemie GmbH, Hamburg, Germany) as solid support. RNA and RNA containing 2′-O-methyl nucleotides were generated by solid phase synthesis employing the corresponding phosphoramidites and 2′-O-methyl phosphoramidites, respectively (Proligo Biochemie GmbH, Hamburg, Germany). These building blocks were incorporated at selected sites within the sequence of the oligoribonucleotide chain using standard nucleoside phosphoramidite chemistry such as described in Current protocols in nucleic acid chemistry, Beaucage, S. L. et al. (Edrs.), John Wiley & Sons, Inc., New York, N.Y., USA. Phosphorothioate linkages were introduced by replacement of the iodine oxidizer solution with a solution of the Beaucage reagent (Chruachem Ltd, Glasgow, UK) in acetonitrile (1%). Further ancillary reagents were obtained from Mallinckrodt Baker (Griesheim, Germany).

[0378] Deprotection and purification of the crude oligoribonucleotides by anion exchange HPLC were carried out according to established procedures. Yields and concentrations were determined by UV absorption of a solution of the respective RNA at a wavelength of 260 nm using a spectral photometer (DU 640B, Beckman Coulter GmbH, Unterschleiβheim, Germany). Double stranded RNA was generated by mixing an equimolar solution of complementary strands in annealing buffer (20 mM sodium phosphate, pH 6.8; 100 mM sodium chloride), heated in a water bath at 85-90° C. for 3 minutes and cooled to room temperature over a period of 3-4 hours. The annealed RNA solution was stored at −20 ° C. until use.

[0379] dsRNA Targeting the Eg5 Gene

[0380] Initial Screening Set

[0381] siRNA design was carried out to identify siRNAs targeting Eg5 (also known as KIF11, HSKP, KNSL1 and TRIP5). Human mRNA sequences to Eg5, RefSeq ID number:NM_{—}004523, was used.

[0382] siRNA duplexes cross-reactive to human and mouse Eg5 were designed. Twenty-four duplexes were synthesized for screening. (Table 1a). A second screening set was defined with 266 siRNAs targeting human Eg5, as well as its rhesus monkey ortholog (Table 2a). An expanded screening set was selected with 328 siRNA targeting human Eg5, with no necessity to hit any Eg5 mRNA of other species (Table 3a).

[0383] The sequences for human and a partial rhesus Eg5 mRNAs were downloaded from NCBI Nucleotide database and the human sequence was further on used as reference sequence (Human EG5:NM_{—}004523.2, 4908 bp, and Rhesus EG5: XM_{—}001087644.1, 878 by (only 5′ part of human EG5).

[0384] For the Tables: Key: A,G,C,U-ribonucleotides: T-deoxythymidine: u,c-2′-O-methyl nucleotides: s-phosphorothioate linkage.

TABLE 1a
Sequences of Eg5/KSP dsRNA duplexes

| | | | | | | | |
|---|---|---|---|---|---|---|---|
| position in | | | | | | | |
| human | SEQ | | SEQ | | SEQ | | |
| Eg5/KSP | ID | sequence of 23mer target | ID | | ID | | duplex |
| sequence | NO: | site | NO: | sense sequence (5′-3′) | No: | antisense sequence (5′-3′) | name |

| | | | | | | | |
|---|---|---|---|---|---|---|---|
| 385-407 | 1244 | ACCGAAGUGUUGUUUGUC | 1 | cGAAGuGuuGuuuGuccA | 2 | UUGGAcAAAcAAcACUUCG | AL-DP- |
| | | CAAUU | | ATsT | | TsT | 6226 |
| 347-369 | 1245 | UAUGGUGUUUGGAGCAUC | 3 | uGGuGuuuGGAGcAucuA | 4 | GuAGAUGCUCcAAAcACcA | AL-DP- |
| | | UACUA | | cTsT | | TsT | 6227 |
| 1078-1100 | 1246 | AAUCUAAACUAACUAGAA | 5 | ucuAAAcuAAcuAGAAuc | 6 | GGAUUCuAGUuAGUUuAGA | AL-DP- |
| | | UCCUC | | cTsT | | TsT | 6228 |
| 1067-1089 | 1247 | UCCUUAUCGAGAAUCUAA | 7 | cuuAucGAGAAucuAAAc | 8 | AGUUuAGAUUCUCGAuAAG | AL-DP- |
| | | ACUAA | | uTsT | | TsT | 6229 |
| 374-396 | 1248 | GAUUGAUGUUUACCGAAG | 9 | uuGAuGuuuAccGAAGuG | 10 | AcACUUCGGuAAAcAUcAA | AL-DP- |
| | | UGUUG | | uTsT | | TsT | 6230 |
| 205-227 | 1249 | UGGUGAGAUGCAGACCAU | 11 | GuGAGAuGcAGAccAuuu | 12 | uAAAUGGUCUGcAUCUcAC | AL-DP- |
| | | UUAAU | | ATsT | | TsT | 6231 |
| 1176-1198 | 1250 | ACUCUGAGUACAUUGGAA | 13 | ucuGAGuAcAuuGGAAuA | 14 | AuAUUCcAAUGuACUcAGA | AL-DP- |
| | | UAUGC | | uTsT | | TsT | 6232 |
| 386-408 | 1251 | CCGAAGUGUUGUUUGUCC | 15 | GAAGuGuuGuuuGuccAA | 16 | AUUGGAcAAAcAAcACUUC | AL-DP- |
| | | AAUUC | | uTsT | | TsT | 6233 |
| 416-438 | 1252 | AGUUAUUAUGGGCUAUAA | 17 | uuAuuAuGGGcuAuAAuu | 18 | cAAUuAuAGCCcAuAAuAA | AL-DP- |
| | | UUGCA | | GTsT | | TsT | 6234 |
| 485-507 | 1253 | GGAAGGUGAAAGGUCACC | 19 | AAGGuGAAAGGucAccuA | 20 | UuAGGUGACCUUUcACCUU | AL-DP- |
| | | UAAUG | | ATsT | | TsT | 6235 |
| 476-498 | 1254 | UUUUACAAUGGAAGGUGA | 21 | uuAcAAuGGAAGGuGAAA | 22 | CUUUcACCUUCcAUUGuAA | AL-DP- |
| | | AAGGU | | GTsT | | TsT | 6236 |
| 486-508 | 1255 | GAAGGUGAAAGGUCACCU | 23 | AGGuGAAAGGucAccuAA | 24 | AUuAGGUGACCUUUcACCU | AL-DP- |
| | | AAUGA | | uTsT | | TsT | 6237 |
| 487-509 | 1256 | AAGGUGAAAGGUCACCUA | 25 | GGuGAAAGGucAccuAAu | 26 | cAUuAGGUGACCUUUcACC | AL-DP- |
| | | AUGAA | | GTsT | | TsT | 6238 |
| 1066-1088 | 1257 | UUCCUUAUCGAGAAUCUA | 27 | ccuuAucGAGAAucuAAA | 28 | GUUuAGAUUCUCGAuAAGG | AL-DP- |
| | | AACUA | | cTsT | | TsT | 6239 |
| 1256-1278 | 1258 | AGCUCUUAUUAAGGAGUA | 29 | cucuuAuuAAGGAGuAuA | 30 | GuAuACUCCUuAAuAAGAG | AL-DP- |
| | | UACGG | | cTsT | | TsT | 6240 |
| 2329-2351 | 1259 | CAGAGAGAUUCUGUGCUU | 31 | GAGAGAuucuGuGcuuuG | 32 | CcAAAGcAcAGAAUCUCUC | AL-DP- |
| | | UGGAG | | GTsT | | TsT | 6241 |
| 1077-1099 | 1260 | GAAUCUAAACUAACUAGA | 33 | AucuAAAcuAAcuAGAAu | 34 | GAUUCuAGUuAGUUuAGAU | AL-DP- |
| | | AUCCU | | cTsT | | TsT | 6242 |
| 1244-1266 | 1261 | ACUCACCAAAAAAGCUCU | 35 | ucAccAAAAAAGcucuuA | 36 | AuAAGAGCUUUUUUGGUGA | AL-DP- |
| | | UAUUA | | uTsT | | TsT | 6243 |
| 637-659 | 1262 | AAGAGCUUUUUGAUCUUC | 37 | GAGcuuuuuGAucuucuu | 38 | uAAGAAGAUcAAAAAGCUC | AL-DP- |
| | | UUAAU | | ATsT | | TsT | 6244 |
| 1117-1139 | 1263 | GGCGUACAAGAACAUCUA | 39 | cGuAcAAGAAcAucuAuA | 40 | UuAuAGAUGUUCUUGuACG | AL-DP- |
| | | UAAUU | | ATsT | | TsT | 6245 |
| 373-395 | 1264 | AGAUUGAUGUUUACCGAA | 41 | AuuGAuGuuuAccGAAGu | 42 | cACUUCGGuAAAcAUcAAU | AL-DP- |
| | | GUGUU | | GTsT | | TsT | 6246 |
| 1079-1101 | 1265 | AUCUAAACUAACUAGAAU | 43 | cuAAAcuAAcuAGAAucc | 44 | AGGAUUCuAGUuAGUUuAG | AL-DP- |
| | | CCUCC | | uTsT | | TsT | 6247 |
| 383-405 | 1266 | UUACCGAAGUGUUGUUUG | 45 | AccGAAGuGuuGuuuGuc | 46 | GGAcAAAcAAcACUUCGGU | AL-DP- |
| | | UCCAA | | cTsT | | TsT | 6248 |
| 200-222 | 1267 | GGUGGUGGUGAGAUGCAG | 47 | uGGuGGuGAGAuGcAGAc | 48 | GGUCUGcAUCUcACcACcA | AL-DP- |
| | | ACCAU | | cTsT | | TsT | 6249 |

TABLE 1b
Analysis of Eg5/KSP ds duplexes

| | single | |
|---|---|---|
| | dose | |
| | screen @ | |
| | 25 nM [% | SDs 2nd screen |
| duplex | residual | (among |
| name | mRNA] | quadruplicates) |
| AL-DP-6226 | 23% | 3% |
| AL-DP-6227 | 69% | 10% |
| AL-DP-6228 | 33% | 2% |
| AL-DP-6229 | 2% | 2% |
| AL-DP-6230 | 66% | 11% |
| AL-DP-6231 | 17% | 1% |
| AL-DP-6232 | 9% | 3% |
| AL-DP-6233 | 24% | 6% |
| AL-DP-6234 | 91% | 2% |
| AL-DP-6235 | 112% | 4% |
| AL-DP-6236 | 69% | 4% |
| AL-DP-6237 | 42% | 2% |
| AL-DP-6238 | 45% | 2% |
| AL-DP-6239 | 2% | 1% |
| AL-DP-6240 | 48% | 2% |
| AL-DP-6241 | 41% | 2% |
| AL-DP-6242 | 8% | 2% |
| AL-DP-6243 | 7% | 1% |
| AL-DP-6244 | 6% | 2% |
| AL-DP-6245 | 12% | 2% |
| AL-DP-6246 | 28% | 3% |
| AL-DP-6247 | 71% | 4% |
| AL-DP-6248 | 5% | 2% |
| AL-DP-6249 | 28% | 3% |

TABLE 2a
Sequences of Eg5/KSP dsRNA duplexes

| SEQ ID | sequence of 19-mer | SEQ ID | | SEQ ID | antisense sequence (5′- | duplex |
|---|---|---|---|---|---|---|
| NO: | target site | NO. | sense sequence (5′-3′) | NO. | 3′) | name |

| | | | | | | |
|---|---|---|---|---|---|---|
| 1268 | CAUACUCUAGUCGUUCCCA | 49 | cAuAcucuAGucGuucccATsT | 50 | UGGGAACGACuAGAGuAUGTsT | AD-12072 |
| 1269 | AGCGCCCAUUCAAUAGUAG | 51 | AGcGcccAuucAAuAGuAGTsT | 52 | CuACuAUUGAAUGGGCGCUTsT | AD-12073 |
| 1270 | GGAAAGCUAGCGCCCAUUC | 53 | GGAAAGcuAGcGcccAuucTsT | 54 | GAAUGGGCGCuAGCUUUCCTsT | AD-12074 |
| 1271 | GAAAGCUAGCGCCCAUUCA | 55 | GAAAGcuAGcGcccAuucATsT | 56 | UGAAUGGGCGCuAGCUUUCTsT | AD-12075 |
| 1272 | AGAAACUACGAUUGAUGGA | 57 | AGAAAcuAcGAuuGAuGGATsT | 58 | UCcAUcAAUCGuAGUUUCUTsT | AD-12076 |
| 1273 | UGUUCCUUAUCGAGAAUCU | 59 | uGuuccuuAucGAGAAucuTsT | 60 | AGAUUCUCGAuAAGGAAcATsT | AD-12077 |
| 1274 | CAGAUUACCUCUGCGAGCC | 61 | cAGAuuAccucuGcGAGccTsT | 62 | GGCUCGcAGAGGuAAUCUGTsT | AD-12078 |
| 1275 | GCGCCCAUUCAAUAGUAGA | 63 | GcGcccAuucAAuAGuAGATsT | 64 | UCuACuAUUGAAUGGGCGCTsT | AD-12079 |
| 1276 | UUGCACUAUCUUUGCGUAU | 65 | uuGcAcuAucuuuGcGuAuTsT | 66 | AuACGcAAAGAuAGUGcAATsT | AD-12080 |
| 1277 | CAGAGCGGAAAGCUAGCGC | 67 | cAGAGcGGAAAGcuAGcGcTsT | 68 | GCGCuAGCUUUCCGCUCUGTsT | AD-12081 |
| 1278 | AGACCUUAUUUGGUAAUCU | 69 | AGAccuuAuuuGGuAAucuTsT | 70 | AGAUuACcAAAuAAGGUCUTsT | AD-12082 |
| 1279 | AUUCUCUUGGAGGGCGUAC | 71 | AuucucuuGGAGGGcGuAcTsT | 72 | GuACGCCCUCcAAGAGAAUTsT | AD-12083 |
| 1280 | GGCUGGUAUAAUUCCACGU | 73 | GGcuGGuAuAAuuccAcGuTsT | 74 | ACGUGGAAUuAuACcAGCCTsT | AD-12084 |
| 1281 | GCGGAAAGCUAGCGCCCAU | 75 | GcGGAAAGcuAGcGcccAuTsT | 76 | AUGGGCGCuAGCUUUCCGCTsT | AD-12085 |
| 1282 | UGCACUAUCUUUGCGUAUG | 77 | uGcAcuAucuuuGcGuAuGTsT | 78 | cAuACGcAAAGAuAGUGcATsT | AD-12086 |
| 1283 | GUAUAAUUCCACGUACCCU | 79 | GuAuAAuuccAcGuAcccuTsT | 80 | AGGGuACGUGGAAUuAuACTsT | AD-12087 |
| 1284 | AGAAUCUAAACUAACUAGA | 81 | AGAAucuAAAcuAAcuAGATsT | 82 | UCuAGUuAGUUuAGAUUCUTsT | AD-12088 |
| 1285 | AGGAGCUGAAUAGGGUUAC | 83 | AGGAGcuGAAuAGGGuuAcTsT | 84 | GuAACCCuAUUcAGCUCCUTsT | AD-12089 |
| 1286 | GAAGUACAUAAGACCUUAU | 85 | GAAGuAcAuAAGAccuuAuTsT | 86 | AuAAGGUCUuAUGuACUUCTsT | AD-12090 |
| 1287 | GACAGUGGCCGAUAAGAUA | 87 | GAcAGuGGccGAuAAGAuATsT | 88 | uAUCUuAUCGGCcACUGUCTsT | AD-12091 |
| 1288 | AAACCACUUAGUAGUGUCC | 89 | AAAccAcuuAGuAGuGuccTsT | 90 | GGAcACuACuAAGUGGUUUTsT | AD-12092 |
| 1289 | UCCCUAGACUUCCCUAUUU | 91 | ucccuAGAcuucccuAuuuTsT | 92 | AAAuAGGGAAGUCuAGGGATsT | AD-12093 |
| 1290 | UAGACUUCCCUAUUUCGCU | 93 | uAGAcuucccuAuuucGcuTsT | 94 | AGCGAAAuAGGGAAGUCuATsT | AD-12094 |
| 1291 | GCGUCGCAGCCAAAUUCGU | 95 | GcGucGcAGccAAAuucGuTsT | 96 | ACGAAUUUGGCUGCGACGCTsT | AD-12095 |
| 1292 | AGCUAGCGCCCAUUCAAUA | 97 | AGcuAGcGcccAuucAAuATsT | 98 | uAUUGAAUGGGCGCuAGCUTsT | AD-12096 |
| 1293 | GAAACUACGAUUGAUGGAG | 99 | GAAAcuAcGAuuGAuGGAGTsT | 100 | CUCcAUcAAUCGuAGUUUCTsT | AD-12097 |
| 1294 | CCGAUAAGAUAGAAGAUCA | 101 | ccGAuAAGAuAGAAGAucATsT | 102 | UGAUCUUCuAUCUuAUCGGTsT | AD-12098 |
| 1295 | UAGCGCCCAUUCAAUAGUA | 103 | uAGcGcccAuucAAuAGuATsT | 104 | uACuAUUGAAUGGGCGCuATsT | AD-12099 |
| 1296 | UUUGCGUAUGGCCAAACUG | 105 | uuuGcGuAuGGccAAAcuGTsT | 106 | cAGUUUGGCcAuACGcAAATsT | AD-12100 |
| 1297 | CACGUACCCUUCAUCAAAU | 107 | cAcGuAcccuucAucAAAuTsT | 108 | AUUUGAUGAAGGGuACGUGTsT | AD-12101 |
| 1298 | UCUUUGCGUAUGGCCAAAC | 109 | ucuuuGcGuAuGGccAAAcTsT | 110 | GUUUGGCcAuACGcAAAGATsT | AD-12102 |
| 1299 | CCGAAGUGUUGUUUGUCCA | 111 | ccGAAGuGuuGuuuGuccATsT | 112 | UGGAcAAAcAAcACUUCGGTsT | AD-12103 |
| 1300 | AGAGCGGAAAGCUAGCGCC | 113 | AGAGcGGAAAGcuAGcGccTsT | 114 | GGCGCuAGCUUUCCGCUCUTsT | AD-12104 |
| 1301 | GCUAGCGCCCAUUCAAUAG | 115 | GcuAGcGcccAuucAAuAGTsT | 116 | CuAUUGAAUGGGCGCuAGCTsT | AD-12105 |
| 1302 | AAGUUAGUGUACGAACUGG | 117 | AAGuuAGuGuAcGAAcuGGTsT | 118 | CcAGUUCGuAcACuAACUUTsT | AD-12106 |
| 1303 | GUACGAACUGGAGGAUUGG | 119 | GuAcGAAcuGGAGGAuuGGTsT | 120 | CcAAUCCUCcAGUUCGuACTsT | AD-12107 |
| 1304 | ACGAACUGGAGGAUUGGCU | 121 | AcGAAcuGGAGGAuuGGcuTsT | 122 | AGCcAAUCCUCcAGUUCGUTsT | AD-12108 |
| 1305 | AGAUUGAUGUUUACCGAAG | 123 | AGAuuGAuGuuuAccGAAGTsT | 124 | CUUCGGuAAAcAUcAAUCUTsT | AD-12109 |
| 1306 | UAUGGGCUAUAAUUGCACU | 125 | uAuGGGcuAuAAuuGcAcuTsT | 126 | AGUGcAAUuAuAGCCcAuATsT | AD-12110 |
| 1307 | AUCUUUGCGUAUGGCCAAA | 127 | AucuuuGcGuAuGGccAAATsT | 128 | UUUGGCcAuACGcAAAGAUTsT | AD-12111 |
| 1308 | ACUCUAGUCGUUCCCACUC | 129 | AcucuAGucGuucccAcucTsT | 130 | GAGUGGGAACGACuAGAGUTsT | AD-12112 |
| 1309 | AACUACGAUUGAUGGAGAA | 131 | AAcuAcGAuuGAuGGAGAATsT | 132 | UUCUCcAUcAAUCGuAGUUTsT | AD-12113 |
| 1310 | GAUAAGAGAGCUCGGGAAG | 133 | GAuAAGAGAGcucGGGAAGTsT | 134 | CUUCCCGAGCUCUCUuAUCTsT | AD-12114 |
| 1311 | UCGAGAAUCUAAACUAACU | 135 | ucGAGAAucuAAAcuAAcuTsT | 136 | AGUuAGUUuAGAUUCUCGATsT | AD-12115 |
| 1312 | AACUAACUAGAAUCCUCCA | 137 | AAcuAAcuAGAAuccuccATsT | 138 | UGGAGGAUUCuAGUuAGUUTsT | AD-12116 |
| 1313 | GGAUCGUAAGAAGGCAGUU | 139 | GGAucGuAAGAAGGcAGuuTsT | 140 | AACUGCCUUCUuACGAUCCTsT | AD-12117 |
| 1314 | AUCGUAAGAAGGCAGUUGA | 141 | AucGuAAGAAGGcAGuuGATsT | 142 | UcAACUGCCUUCUuACGAUTsT | AD-12118 |
| 1315 | AGGCAGUUGACCAACACAA | 143 | AGGcAGuuGAccAAcAcAATsT | 144 | UUGUGUUGGUcAACUGCCUTsT | AD-12119 |
| 1316 | UGGCCGAUAAGAUAGAAGA | 145 | uGGccGAuAAGAuAGAAGATsT | 146 | UCUUCuAUCUuAUCGGCcATsT | AD-12120 |
| 1317 | UCUAAGGAUAUAGUCAACA | 147 | ucuAAGGAuAuAGucAAcATsT | 148 | UGUUGACuAuAUCCUuAGATsT | AD-12121 |
| 1318 | ACUAAGCUUAAUUGCUUUC | 149 | AcuAAGcuuAAuuGcuuucTsT | 150 | GAAAGcAAUuAAGCUuAGUTsT | AD-12122 |
| 1319 | GCCCAGAUCAACCUUUAAU | 151 | GcccAGAucAAccuuuAAuTsT | 152 | AUuAAAGGUUGAUCUGGGCTsT | AD-12123 |
| 1320 | UUAAUUUGGCAGAGCGGAA | 153 | uuAAuuuGGcAGAGcGGAATsT | 154 | UUCCGCUCUGCcAAAUuAATsT | AD-12124 |
| 1321 | UUAUCGAGAAUCUAAACUA | 155 | uuAucGAGAAucuAAAcuATsT | 156 | uAGUUuAGAUUCUCGAuAATsT | AD-12125 |
| 1322 | CUAGCGCCCAUUCAAUAGU | 157 | cuAGcGcccAuucAAuAGuTsT | 158 | ACuAUUGAAUGGGCGCuAGTsT | AD-12126 |
| 1323 | AAUAGUAGAAUGUGAUCCU | 159 | AAuAGuAGAAuGuGAuccuTsT | 160 | AGGAUcAcAUUCuACuAUUTsT | AD-12127 |
| 1324 | UACGAAAAGAAGUUAGUGU | 161 | uAcGAAAAGAAGuuAGuGuTsT | 162 | AcACuAACUUCUUUUCGuATsT | AD-12128 |
| 1325 | AGAAGUUAGUGUACGAACU | 163 | AGAAGuuAGuGuAcGAAcuTsT | 164 | AGUUCGuAcACuAACUUCUTsT | AD-12129 |
| 1326 | ACUAAACAGAUUGAUGUUU | 165 | AcuAAAcAGAuuGAuGuuuTsT | 166 | AAAcAUcAAUCUGUUuAGUTsT | AD-12130 |
| 1327 | CUUUGCGUAUGGCCAAACU | 167 | cuuuGcGuAuGGccAAAcuTsT | 168 | AGUUUGGCcAuACGcAAAGTsT | AD-12131 |
| 1328 | AAUGAAGAGUAUACCUGGG | 169 | AAuGAAGAGuAuAccuGGGTsT | 170 | CCcAGGuAuACUCUUcAUUTsT | AD-12132 |
| 1329 | AUAAUUCCACGUACCCUUC | 171 | AuAAuuccAcGuAcccuucTsT | 172 | GAAGGGuACGUGGAAUuAUTsT | AD-12133 |
| 1330 | ACGUACCCUUCAUCAAAUU | 173 | AcGuAcccuucAucAAAuuTsT | 174 | AAUUUGAUGAAGGGuACGUTsT | AD-12134 |
| 1331 | CGUACCCUUCAUCAAAUUU | 175 | cGuAcccuucAucAAAuuuTsT | 176 | AAAUUUGAUGAAGGGuACGTsT | AD-12135 |
| 1332 | GUACCCUUCAUCAAAUUUU | 177 | GuAcccuucAucAAAuuuuTsT | 178 | AAAAUUUGAUGAAGGGuACTsT | AD-12136 |
| 1333 | AACUUACUGAUAAUGGUAC | 179 | AAcuuAcuGAuAAuGGuAcTsT | 180 | GuACcAUuAUcAGuAAGUUTsT | AD-12137 |
| 1334 | UUCAGUCAAAGUGUCUCUG | 181 | uucAGucAAAGuGucucuGTsT | 182 | cAGAGAcACUUUGACUGAATsT | AD-12138 |
| 1335 | UUCUUAAUCCAUCAUCUGA | 183 | uucuuAAuccAucAucuGATsT | 184 | UcAGAUGAUGGAUuAAGAATsT | AD-12139 |
| 1336 | ACAGUACACAACAAGGAUG | 185 | AcAGuAcAcAAcAAGGAuGTsT | 186 | cAUCCUUGUUGUGuACUGUTsT | AD-12140 |
| 1337 | AAGAAACUACGAUUGAUGG | 187 | AAGAAAcuAcGAuuGAuGGTsT | 188 | CcAUcAAUCGuAGUUUCUUTsT | AD-12141 |
| 1338 | AAACUACGAUUGAUGGAGA | 189 | AAAcuAcGAuuGAuGGAGATsT | 190 | UCUCcAUcAAUCGuAGUUUTsT | AD-12142 |
| 1339 | UGGAGCUGUUGAUAAGAGA | 191 | uGGAGcuGuuGAuAAGAGATsT | 192 | UCUCUuAUcAAcAGCUCcATsT | AD-12143 |
| 1340 | CUAACUAGAAUCCUCCAGG | 193 | cuAAcuAGAAuccuccAGGTsT | 194 | CCUGGAGGAUUCuAGUuAGTsT | AD-12144 |
| 1341 | GAAUAUGCUCAUAGAGCAA | 195 | GAAuAuGcucAuAGAGcAATsT | 196 | UUGCUCuAUGAGcAuAUUCTsT | AD-12145 |
| 1342 | AUGCUCAUAGAGCAAAGAA | 197 | AuGcucAuAGAGcAAAGAATsT | 198 | UUCUUUGCUCuAUGAGcAUTsT | AD-12146 |
| 1343 | AAAAAUUGGUGCUGUUGAG | 199 | AAAAAuuGGuGcuGuuGAGTsT | 200 | CUcAAcAGcACcAAUUUUUTsT | AD-12147 |
| 1344 | GAGGAGCUGAAUAGGGUUA | 201 | GAGGAGcuGAAuAGGGuuATsT | 202 | uAACCCuAUUcAGCUCCUCTsT | AD-12148 |
| 1345 | GGAGCUGAAUAGGGUUACA | 203 | GGAGcuGAAuAGGGuuAcATsT | 204 | UGuAACCCuAUUcAGCUCCTsT | AD-12149 |
| 1346 | GAGCUGAAUAGGGUUACAG | 205 | GAGcuGAAuAGGGuuAcAGTsT | 206 | CUGuAACCCuAUUcAGCUCTsT | AD-12150 |
| 1347 | AGCUGAAUAGGGUUACAGA | 207 | AGcuGAAuAGGGuuAcAGATsT | 208 | UCUGuAACCCuAUUcAGCUTsT | AD-12151 |
| 1348 | GCUGAAUAGGGUUACAGAG | 209 | GcuGAAuAGGGuuAcAGAGTsT | 210 | CUCUGuAACCCuAUUcAGCTsT | AD-12152 |
| 1349 | CCAAACUGGAUCGUAAGAA | 211 | ccAAAcuGGAucGuAAGAATsT | 212 | UUCUuACGAUCcAGUUUGGTsT | AD-12153 |
| 1350 | GAUCGUAAGAAGGCAGUUG | 213 | GAucGuAAGAAGGcAGuuGTsT | 214 | cAACUGCCUUCUuACGAUCTsT | AD-12154 |
| 1351 | ACCUUAUUUGGUAAUCUGC | 215 | AccuuAuuuGGuAAucuGcTsT | 216 | GcAGAUuACcAAAuAAGGUTsT | AD-12155 |
| 1352 | UUAGAUACCAUUACUACAG | 217 | uuAGAuAccAuuAcuAcAGTsT | 218 | CUGuAGuAAUGGuAUCuAATsT | AD-12156 |
| 1353 | AUACCAUUACUACAGUAGC | 219 | AuAccAuuAcuAcAGuAGcTsT | 220 | GCuACUGuAGuAAUGGuAUTsT | AD-12157 |
| 1354 | UACUACAGUAGCACUUGGA | 221 | uAcuAcAGuAGcAcuuGGATsT | 222 | UCcAAGUGCuACUGuAGuATsT | AD-12158 |
| 1355 | AAAGUAAAACUGUACUACA | 223 | AAAGuAAAAcuGuAcuAcATsT | 224 | UGuAGuAcAGUUUuACUUUTsT | AD-12159 |
| 1356 | CUCAAGACUGAUCUUCUAA | 225 | cucAAGAcuGAucuucuAATsT | 226 | UuAGAAGAUcAGUCUUGAGTsT | AD-12160 |
| 1357 | UUGACAGUGGCCGAUAAGA | 227 | uuGAcAGuGGccGAuAAGATsT | 228 | UCUuAUCGGCcACUGUcAATsT | AD-12161 |
| 1358 | UGACAGUGGCCGAUAAGAU | 229 | uGAcAGuGGccGAuAAGAuTsT | 230 | AUCUuAUCGGCcACUGUcATsT | AD-12162 |
| 1359 | GCAAUGUGGAAACCUAACU | 231 | GcAAuGuGGAAAccuAAcuTsT | 232 | AGUuAGGUUUCcAcAUUGCTsT | AD-12163 |
| 1360 | CCACUUAGUAGUGUCCAGG | 233 | ccAcuuAGuAGuGuccAGGTsT | 234 | CCUGGAcACuACuAAGUGGTsT | AD-12164 |
| 1361 | AGAAGGUACAAAAUUGGUU | 235 | AGAAGGuAcAAAAuuGGuuTsT | 236 | AACcAAUUUUGuACCUUCUTsT | AD-12165 |
| 1362 | UGGUUUGACUAAGCUUAAU | 237 | uGGuuuGAcuAAGcuuAAuTsT | 238 | AUuAAGCUuAGUcAAACcATsT | AD-12166 |
| 1363 | GGUUUGACUAAGCUUAAUU | 239 | GGuuuGAcuAAGcuuAAuuTsT | 240 | AAUuAAGCUuAGUcAAACCTsT | AD-12167 |
| 1364 | UCUAAGUCAAGAGCCAUCU | 241 | ucuAAGucAAGAGccAucuTsT | 242 | AGAUGGCUCUUGACUuAGATsT | AD-12168 |
| 1365 | UCAUCCCUAUAGUUCACUU | 243 | ucAucccuAuAGuucAcuuTsT | 244 | AAGUGAACuAuAGGGAUGATsT | AD-12169 |
| 1366 | CAUCCCUAUAGUUCACUUU | 245 | cAucccuAuAGuucAcuuuTsT | 246 | AAAGUGAACuAuAGGGAUGTsT | AD-12170 |
| 1367 | CCCUAGACUUCCCUAUUUC | 247 | cccuAGAcuucccuAuuucTsT | 248 | GAAAuAGGGAAGUCuAGGGTsT | AD-12171 |
| 1368 | AGACUUCCCUAUUUCGCUU | 249 | AGAcuucccuAuuucGcuuTsT | 250 | AAGCGAAAuAGGGAAGUCUTsT | AD-12172 |
| 1369 | UCACCAAACCAUUUGUAGA | 251 | ucAccAAAccAuuuGuAGATsT | 252 | UCuAcAAAUGGUUUGGUGATsT | AD-12173 |
| 1370 | UCCUUUAAGAGGCCUAACU | 253 | uccuuuAAGAGGccuAAcuTsT | 254 | AGUuAGGCCUCUuAAAGGATsT | AD-12174 |
| 1371 | UUUAAGAGGCCUAACUCAU | 255 | uuuAAGAGGccuAAcucAuTsT | 256 | AUGAGUuAGGCCUCUuAAATsT | AD-12175 |
| 1372 | UUAAGAGGCCUAACUCAUU | 257 | uuAAGAGGccuAAcucAuuTsT | 258 | AAUGAGUuAGGCCUCUuAATsT | AD-12176 |
| 1373 | GGCCUAACUCAUUCACCCU | 259 | GGccuAAcucAuucAcccuTsT | 260 | AGGGUGAAUGAGUuAGGCCTsT | AD-12177 |
| 1374 | UGGUAUUUUUGAUCUGGCA | 261 | uGGuAuuuuuGAucuGGcATsT | 262 | UGCcAGAUcAAAAAuACcATsT | AD-12178 |
| 1375 | AGUUUAGUGUGUAAAGUUU | 263 | AGuuuAGuGuGuAAAGuuuTsT | 264 | AAACUUuAcAcACuAAACUTsT | AD-12179 |
| 1376 | GCCAAAUUCGUCUGCGAAG | 265 | GccAAAuucGucuGcGAAGTsT | 266 | CUUCGcAGACGAAUUUGGCTsT | AD-12180 |
| 1377 | AAUUCGUCUGCGAAGAAGA | 267 | AAuucGucuGcGAAGAAGATsT | 268 | UCUUCUUCGcAGACGAAUUTsT | AD-12181 |
| 1378 | UGAAAGGUCACCUAAUGAA | 269 | uGAAAGGucAccuAAuGAATsT | 270 | UUcAUuAGGUGACCUUUcATsT | AD-12182 |
| 1379 | CAGACCAUUUAAUUUGGCA | 271 | cAGAccAuuuAAuuuGGcATsT | 272 | UGCcAAAUuAAAUGGUCUGTsT | AD-12183 |
| 1380 | AGACCAUUUAAUUUGGCAG | 273 | AGAccAuuuAAuuuGGcAGTsT | 274 | CUGCcAAAUuAAAUGGUCUTsT | AD-12184 |
| 1381 | AGUUAUUAUGGGCUAUAAU | 275 | AGuuAuuAuGGGcuAuAAuTsT | 276 | AUuAuAGCCcAuAAuAACUTsT | AD-12185 |
| 1382 | GCUGGUAUAAUUCCACGUA | 277 | GcuGGuAuAAuuccAcGuATsT | 278 | uACGUGGAAUuAuACcAGCTsT | AD-12186 |
| 1383 | AUUUAAUUUGGCAGAGCGG | 279 | AuuuAAuuuGGcAGAGcGGTsT | 280 | CCGCUCUGCcAAAUuAAAUTsT | AD-12187 |
| 1384 | UUUAAUUUGGCAGAGCGGA | 281 | uuuAAuuuGGcAGAGcGGATsT | 282 | UCCGCUCUGCcAAAUuAAATsT | AD-12188 |
| 1385 | UUUGGCAGAGCGGAAAGCU | 283 | uuuGGcAGAGcGGAAAGcuTsT | 284 | AGCUUUCCGCUCUGCcAAATsT | AD-12189 |
| 1386 | UUUUACAAUGGAAGGUGAA | 285 | uuuuAcAAuGGAAGGuGAATsT | 286 | UUcACCUUCcAUUGuAAAATsT | AD-12190 |
| 1387 | AAUGGAAGGUGAAAGGUCA | 287 | AAuGGAAGGuGAAAGGucATsT | 288 | UGACCUUUcACCUUCcAUUTsT | AD-12191 |
| 1388 | UGAGAUGCAGACCAUUUAA | 289 | uGAGAuGcAGAccAuuuAATsT | 290 | UuAAAUGGUCUGcAUCUcATsT | AD-12192 |
| 1389 | UCGCAGCCAAAUUCGUCUG | 291 | ucGcAGccAAAuucGucuGTsT | 292 | cAGACGAAUUUGGCUGCGATsT | AD-12193 |
| 1390 | GGCUAUAAUUGCACUAUCU | 293 | GGcuAuAAuuGcAcuAucuTsT | 294 | AGAuAGUGcAAUuAuAGCCTsT | AD-12194 |
| 1391 | AUUGACAGUGGCCGAUAAG | 295 | AuuGAcAGuGGccGAuAAGTsT | 296 | CUuAUCGGCcACUGUcAAUTsT | AD-12195 |
| 1392 | CUAGACUUCCCUAUUUCGC | 297 | cuAGAcuucccuAuuucGcTsT | 298 | GCGAAAuAGGGAAGUCuAGTsT | AD-12196 |
| 1393 | ACUAUCUUUGCGUAUGGCC | 299 | AcuAucuuuGcGuAuGGccTsT | 300 | GGCcAuACGcAAAGAuAGUTsT | AD-12197 |
| 1394 | AUACUCUAGUCGUUCCCAC | 301 | AuAcucuAGucGuucccAcTsT | 302 | GUGGGAACGACuAGAGuAUTsT | AD-12198 |
| 1395 | AAAGAAACUACGAUUGAUG | 303 | AAAGAAAcuAcGAuuGAuGTsT | 304 | cAUcAAUCGuAGUUUCUUUTsT | AD-12199 |
| 1396 | GCCUUGAUUUUUUGGCGGG | 305 | GccuuGAuuuuuuGGcGGGTsT | 306 | CCCGCcAAAAAAUcAAGGCTsT | AD-12200 |
| 1397 | CGCCCAUUCAAUAGUAGAA | 307 | cGcccAuucAAuAGuAGAATsT | 308 | UUCuACuAUUGAAUGGGCGTsT | AD-12201 |
| 1398 | CCUUAUUUGGUAAUCUGCU | 309 | ccuuAuuuGGuAAucuGcuTsT | 310 | AGcAGAUuACcAAAuAAGGTsT | AD-12202 |
| 1399 | AGAGACAAUUCCGGAUGUG | 311 | AGAGAcAAuuccGGAuGuGTsT | 312 | cAcAUCCGGAAUUGUCUCUTsT | AD-12203 |
| 1400 | UGACUUUGAUAGCUAAAUU | 313 | uGAcuuuGAuAGcuAAAuuTsT | 314 | AAUUuAGCuAUcAAAGUcATsT | AD-12204 |
| 1401 | UGGCAGAGCGGAAAGCUAG | 315 | uGGcAGAGcGGAAAGcuAGTsT | 316 | CuAGCUUUCCGCUCUGCcATsT | AD-12205 |
| 1402 | GAGCGGAAAGCUAGCGCCC | 317 | GAGcGGAAAGcuAGcGcccTsT | 318 | GGGCGCuAGCUUUCCGCUCTsT | AD-12206 |
| 1403 | AAAGAAGUUAGUGUACGAA | 319 | AAAGAAGuuAGuGuAcGAATsT | 320 | UUCGuAcACuAACUUCUUUTsT | AD-12207 |
| 1404 | AUUGCACUAUCUUUGCGUA | 321 | AuuGcAcuAucuuuGcGuATsT | 322 | uACGcAAAGAuAGUGcAAUTsT | AD-12208 |
| 1405 | GGUAUAAUUCCACGUACCC | 323 | GGuAuAAuuccAcGuAcccTsT | 324 | GGGuACGUGGAAUuAuACCTsT | AD-12209 |
| 1406 | UACUCUAGUCGUUCCCACU | 325 | uAcucuAGucGuucccAcuTsT | 326 | AGUGGGAACGACuAGAGuATsT | AD-12210 |
| 1407 | UAUGAAAGAAACUACGAUU | 327 | uAuGAAAGAAAcuAcGAuuTsT | 328 | AAUCGuAGUUUCUUUcAuATsT | AD-12211 |
| 1408 | AUGCUAGAAGUACAUAAGA | 329 | AuGcuAGAAGuAcAuAAGATsT | 330 | UCUuAUGuACUUCuAGcAUTsT | AD-12212 |
| 1409 | AAGUACAUAAGACCUUAUU | 331 | AAGuAcAuAAGAccuuAuuTsT | 332 | AAuAAGGUCUuAUGuACUUTsT | AD-12213 |
| 1410 | ACAGCCUGAGCUGUUAAUG | 333 | AcAGccuGAGcuGuuAAuGTsT | 334 | cAUuAAcAGCUcAGGCUGUTsT | AD-12214 |
| 1411 | AAAGAAGAGACAAUUCCGG | 335 | AAAGAAGAGAcAAuuccGGTsT | 336 | CCGGAAUUGUCUCUUCUUUTsT | AD-12215 |
| 1412 | CACACUGGAGAGGUCUAAA | 337 | cAcAcuGGAGAGGucuAAATsT | 338 | UUuAGACCUCUCcAGUGUGTsT | AD-12216 |
| 1413 | CACUGGAGAGGUCUAAAGU | 339 | cAcuGGAGAGGucuAAAGuTsT | 340 | ACUUuAGACCUCUCcAGUGTsT | AD-12217 |
| 1414 | ACUGGAGAGGUCUAAAGUG | 341 | AcuGGAGAGGucuAAAGuGTsT | 342 | cACUUuAGACCUCUCcAGUTsT | AD-12218 |
| 1415 | CGUCGCAGCCAAAUUCGUC | 343 | cGucGcAGccAAAuucGucTsT | 344 | GACGAAUUUGGCUGCGACGTsT | AD-12219 |
| 1416 | GAAGGCAGUUGACCAACAC | 345 | GAAGGcAGuuGAccAAcAcTsT | 346 | GUGUUGGUcAACUGCCUUCTsT | AD-12220 |
| 1417 | CAUUCACCCUGACAGAGUU | 347 | cAuucAcccuGAcAGAGuuTsT | 348 | AACUCUGUcAGGGUGAAUGTsT | AD-12221 |
| 1418 | AAGAGGCCUAACUCAUUCA | 349 | AAGAGGccuAAcucAuucATsT | 350 | UGAAUGAGUuAGGCCUCUUTsT | AD-12222 |
| 1419 | GAGACAAUUCCGGAUGUGG | 351 | GAGAcAAuuccGGAuGuGGTsT | 352 | CcAcAUCCGGAAUUGUCUCTsT | AD-12223 |
| 1420 | UUCCGGAUGUGGAUGUAGA | 353 | uuccGGAuGuGGAuGuAGATsT | 354 | UCuAcAUCcAcAUCCGGAATsT | AD-12224 |
| 1421 | AAGCUAGCGCCCAUUCAAU | 355 | AAGcuAGcGcccAuucAAuTsT | 356 | AUUGAAUGGGCGCuAGCUUTsT | AD-12225 |
| 1422 | GAAGUUAGUGUACGAACUG | 357 | GAAGuuAGuGuAcGAAcuGTsT | 358 | cAGUUCGuAcACuAACUUCTsT | AD-12226 |
| 1423 | UAUAAUUCCACGUACCCUU | 359 | uAuAAuuccAcGuAcccuuTsT | 360 | AAGGGuACGUGGAAUuAuATsT | AD-12227 |
| 1424 | ACAGUGGCCGAUAAGAUAG | 361 | AcAGuGGccGAuAAGAuAGTsT | 362 | CuAUCUuAUCGGCcACUGUTsT | AD-12228 |
| 1425 | UCUGUCAUCCCUAUAGUUC | 363 | ucuGucAucccuAuAGuucTsT | 364 | GAACuAuAGGGAUGAcAGATsT | AD-12229 |
| 1426 | UUCUUGCUAUGACUUGUGU | 365 | uucuuGcuAuGAcuuGuGuTsT | 366 | AcAcAAGUcAuAGcAAGAATsT | AD-12230 |
| 1427 | GUAAGAAGGCAGUUGACCA | 367 | GuAAGAAGGcAGuuGAccATsT | 368 | UGGUcAACUGCCUUCUuACTsT | AD-12231 |
| 1428 | CAUUGACAGUGGCCGAUAA | 369 | cAuuGAcAGuGGccGAuAATsT | 370 | UuAUCGGCcACUGUcAAUGTsT | AD-12232 |
| 1429 | AGAAACCACUUAGUAGUGU | 371 | AGAAAccAcuuAGuAGuGuTsT | 372 | AcACuACuAAGUGGUUUCUTsT | AD-12233 |
| 1430 | GGAUUGUUCAUCAAUUGGC | 373 | GGAuuGuucAucAAuuGGcTsT | 374 | GCcAAUUGAUGAAcAAUCCTsT | AD-12234 |
| 1431 | UAAGAGGCCUAACUCAUUC | 375 | uAAGAGGccuAAcucAuucTsT | 376 | GAAUGAGUuAGGCCUCUuATsT | AD-12235 |
| 1432 | AGUUAGUGUACGAACUGGA | 377 | AGuuAGuGuAcGAAcuGGATsT | 378 | UCcAGUUCGuAcACuAACUTsT | AD-12236 |
| 1433 | AGUACAUAAGACCUUAUUU | 379 | AGuAcAuAAGAccuuAuuuTsT | 380 | AAAuAAGGUCUuAUGuACUTsT | AD-12237 |
| 1434 | UGAGCCUUGUGUAUAGAUU | 381 | uGAGccuuGuGuAuAGAuuTsT | 382 | AAUCuAuAcAcAAGGCUcATsT | AD-12238 |
| 1435 | CCUUUAAGAGGCCUAACUC | 383 | ccuuuAAGAGGccuAAcucTsT | 384 | GAGUuAGGCCUCUuAAAGGTsT | AD-12239 |
| 1436 | ACCACUUAGUAGUGUCCAG | 385 | AccAcuuAGuAGuGuccAGTsT | 386 | CUGGAcACuACuAAGUGGUTsT | AD-12240 |
| 1437 | GAAACUUCCAAUUAUGUCU | 387 | GAAAcuuccAAuuAuGucuTsT | 388 | AGAcAuAAUUGGAAGUUUCTsT | AD-12241 |
| 1438 | UGCAUACUCUAGUCGUUCC | 389 | uGcAuAcucuAGucGuuccTsT | 390 | GGAACGACuAGAGuAUGcATsT | AD-12242 |
| 1439 | AGAAGGCAGUUGACCAACA | 391 | AGAAGGcAGuuGAccAAcATsT | 392 | UGUUGGUcAACUGCCUUCUTsT | AD-12243 |
| 1440 | GUACAUAAGACCUUAUUUG | 393 | GuAcAuAAGAccuuAuuuGTsT | 394 | cAAAuAAGGUCUuAUGuACTsT | AD-12244 |
| 1441 | UAUAAUUGCACUAUCUUUG | 395 | uAuAAuuGcAcuAucuuuGTsT | 396 | cAAAGAuAGUGcAAUuAuATsT | AD-12245 |
| 1442 | UCUCUGUUACAAUACAUAU | 397 | ucucuGuuAcAAuAcAuAuTsT | 398 | AuAUGuAUUGuAAcAGAGATsT | AD-12246 |
| 1443 | UAUGCUCAUAGAGCAAAGA | 399 | uAuGcucAuAGAGcAAAGATsT | 400 | UCUUUGCUCuAUGAGcAuATsT | AD-12247 |
| 1444 | UGUUGUUUGUCCAAUUCUG | 401 | uGuuGuuuGuccAAuucuGTsT | 402 | cAGAAUUGGAcAAAcAAcATsT | AD-12248 |
| 1445 | ACUAACUAGAAUCCUCCAG | 403 | AcuAAcuAGAAuccuccAGTsT | 404 | CUGGAGGAUUCuAGUuAGUTsT | AD-12249 |
| 1446 | UGUGGUGUCUAUACUGAAA | 405 | uGuGGuGucuAuAcuGAAATsT | 406 | UUUcAGuAuAGAcACcAcATsT | AD-12250 |
| 1447 | UAUUAUGGGAGACCACCCA | 407 | uAuuAuGGGAGAccAcccATsT | 408 | UGGGUGGUCUCCcAuAAuATsT | AD-12251 |
| 1448 | AAGGAUGAAGUCUAUCAAA | 409 | AAGGAuGAAGucuAucAAATsT | 410 | UUUGAuAGACUUcAUCCUUTsT | AD-12252 |
| 1449 | UUGAUAAGAGAGCUCGGGA | 411 | uuGAuAAGAGAGcucGGGATsT | 412 | UCCCGAGCUCUCUuAUcAATsT | AD-12253 |
| 1450 | AUGUUCCUUAUCGAGAAUC | 413 | AuGuuccuuAucGAGAAucTsT | 414 | GAUUCUCGAuAAGGAAcAUTsT | AD-12254 |
| 1451 | GGAAUAUGCUCAUAGAGCA | 415 | GGAAuAuGcucAuAGAGcATsT | 416 | UGCUCuAUGAGcAuAUUCCTsT | AD-12255 |
| 1452 | CCAUUCCAAACUGGAUCGU | 417 | ccAuuccAAAcuGGAucGuTsT | 418 | ACGAUCcAGUUUGGAAUGGTsT | AD-12256 |
| 1453 | GGCAGUUGACCAACACAAU | 419 | GGcAGuuGAccAAcAcAAuTsT | 420 | AUUGUGUUGGUcAACUGCCTsT | AD-12257 |
| 1454 | CAUGCUAGAAGUACAUAAG | 421 | cAuGcuAGAAGuAcAuAAGTsT | 422 | CUuAUGuACUUCuAGcAUGTsT | AD-12258 |
| 1455 | CUAGAAGUACAUAAGACCU | 423 | cuAGAAGuAcAuAAGAccuTsT | 424 | AGGUCUuAUGuACUUCuAGTsT | AD-12259 |
| 1456 | UUGGAUCUCUCACAUCUAU | 425 | uuGGAucucucAcAucuAuTsT | 426 | AuAGAUGUGAGAGAUCcAATsT | AD-12260 |
| 1457 | AACUGUGGUGUCUAUACUG | 427 | AAcuGuGGuGucuAuAcuGTsT | 428 | cAGuAuAGAcACcAcAGUUTsT | AD-12261 |
| 1458 | UCAUUGACAGUGGCCGAUA | 429 | ucAuuGAcAGuGGccGAuATsT | 430 | uAUCGGCcACUGUcAAUGATsT | AD-12262 |
| 1459 | AUAAAGCAGACCCAUUCCC | 431 | AuAAAGcAGAcccAuucccTsT | 432 | GGGAAUGGGUCUGCUUuAUTsT | AD-12263 |
| 1460 | ACAGAAACCACUUAGUAGU | 433 | AcAGAAAccAcuuAGuAGuTsT | 434 | ACuACuAAGUGGUUUCUGUTsT | AD-12264 |
| 1461 | GAAACCACUUAGUAGUGUC | 435 | GAAAccAcuuAGuAGuGucTsT | 436 | GAcACuACuAAGUGGUUUCTsT | AD-12265 |
| 1462 | AAAUCUAAGGAUAUAGUCA | 437 | AAAucuAAGGAuAuAGucATsT | 438 | UGACuAuAUCCUuAGAUUUTsT | AD-12266 |
| 1463 | UUAUUUAUACCCAUCAACA | 439 | uuAuuuAuAcccAucAAcATsT | 440 | UGUUGAUGGGuAuAAAuAATsT | AD-12267 |
| 1464 | ACAGAGGCAUUAACACACU | 441 | AcAGAGGcAuuAAcAcAcuTsT | 442 | AGUGUGUuAAUGCCUCUGUTsT | AD-12268 |
| 1465 | ACACACUGGAGAGGUCUAA | 443 | AcAcAcuGGAGAGGucuAATsT | 444 | UuAGACCUCUCcAGUGUGUTsT | AD-12269 |
| 1466 | ACACUGGAGAGGUCUAAAG | 445 | AcAcuGGAGAGGucuAAAGTsT | 446 | CUUuAGACCUCUCcAGUGUTsT | AD-12270 |
| 1467 | CGAGCCCAGAUCAACCUUU | 447 | cGAGcccAGAucAAccuuuTsT | 448 | AAAGGUUGAUCUGGGCUCGTsT | AD-12271 |
| 1468 | UCCCUAUUUCGCUUUCUCC | 449 | ucccuAuuucGcuuucuccTsT | 450 | GGAGAAAGCGAAAuAGGGATsT | AD-12272 |
| 1469 | UCUAAAAUCACUGUCAACA | 451 | ucuAAAAucAcuGucAAcATsT | 452 | UGUUGAcAGUGAUUUuAGATsT | AD-12273 |
| 1470 | AGCCAAAUUCGUCUGCGAA | 453 | AGccAAAuucGucuGcGAATsT | 454 | UUCGcAGACGAAUUUGGCUTsT | AD-12274 |
| 1471 | CCCAUUCAAUAGUAGAAUG | 455 | cccAuucAAuAGuAGAAuGTsT | 456 | cAUUCuACuAUUGAAUGGGTsT | AD-12275 |
| 1472 | GAUGAAUGCAUACUCUAGU | 457 | GAuGAAuGcAuAcucuAGuTsT | 458 | ACuAGAGuAUGcAUUcAUCTsT | AD-12276 |
| 1473 | CUCAUGUUCCUUAUCGAGA | 459 | cucAuGuuccuuAucGAGATsT | 460 | UCUCGAuAAGGAAcAUGAGTsT | AD-12277 |
| 1474 | GAGAAUCUAAACUAACUAG | 461 | GAGAAucuAAAcuAAcuAGTsT | 462 | CuAGUuAGUUuAGAUUCUCTsT | AD-12278 |
| 1475 | UAGAAGUACAUAAGACCUU | 463 | uAGAAGuAcAuAAGAccuuTsT | 464 | AAGGUCUuAUGuACUUCuATsT | AD-12279 |
| 1476 | CAGCCUGAGCUGUUAAUGA | 465 | cAGccuGAGcuGuuAAuGATsT | 466 | UcAUuAAcAGCUcAGGCUGTsT | AD-12280 |
| 1477 | AAGAAGAGACAAUUCCGGA | 467 | AAGAAGAGAcAAuuccGGATsT | 468 | UCCGGAAUUGUCUCUUCUUTsT | AD-12281 |
| 1478 | UGCUGGUGUGGAUUGUUCA | 469 | uGcuGGuGuGGAuuGuucATsT | 470 | UGAAcAAUCcAcACcAGcATsT | AD-12282 |
| 1479 | AAAUUCGUCUGCGAAGAAG | 471 | AAAuucGucuGcGAAGAAGTsT | 472 | CUUCUUCGcAGACGAAUUUTsT | AD-12283 |
| 1480 | UUUCUGGAAGUUGAGAUGU | 473 | uuucuGGAAGuuGAGAuGuTsT | 474 | AcAUCUcAACUUCcAGAAATsT | AD-12284 |
| 1481 | UACUAAACAGAUUGAUGUU | 475 | uAcuAAAcAGAuuGAuGuuTsT | 476 | AAcAUcAAUCUGUUuAGuATsT | AD-12285 |
| 1482 | GAUUGAUGUUUACCGAAGU | 477 | GAuuGAuGuuuAccGAAGuTsT | 478 | ACUUCGGuAAAcAUcAAUCTsT | AD-12286 |
| 1483 | GCACUAUCUUUGCGUAUGG | 479 | GcAcuAucuuuGcGuAuGGTsT | 480 | CcAuACGcAAAGAuAGUGCTsT | AD-12287 |
| 1484 | UGGUAUAAUUCCACGUACC | 481 | uGGuAuAAuuccAcGuAccTsT | 482 | GGuACGUGGAAUuAuACcATsT | AD-12288 |
| 1485 | AGCAAGCUGCUUAACACAG | 483 | AGcAAGcuGcuuAAcAcAGTsT | 484 | CUGUGUuAAGcAGCUUGCUTsT | AD-12289 |
| 1486 | CAGAAACCACUUAGUAGUG | 485 | cAGAAAccAcuuAGuAGuGTsT | 486 | cACuACuAAGUGGUUUCUGTsT | AD-12290 |
| 1487 | AACUUAUUGGAGGUUGUAA | 487 | AAcuuAuuGGAGGuuGuAATsT | 488 | UuAcAACCUCcAAuAAGUUTsT | AD-12291 |
| 1488 | CUGGAGAGGUCUAAAGUGG | 489 | cuGGAGAGGucuAAAGuGGTsT | 490 | CcACUUuAGACCUCUCcAGTsT | AD-12292 |
| 1489 | AAAAAAGAUAUAAGGCAGU | 491 | AAAAAAGAuAuAAGGcAGuTsT | 492 | ACUGCCUuAuAUCUUUUUUTsT | AD-12293 |
| 1490 | GAAUUUUGAUAUCUACCCA | 493 | GAAuuuuGAuAucuAcccATsT | 494 | UGGGuAGAuAUcAAAAUUCTsT | AD-12294 |
| 1491 | GUAUUUUUGAUCUGGCAAC | 495 | GuAuuuuuGAucuGGcAAcTsT | 496 | GUUGCcAGAUcAAAAAuACTsT | AD-12295 |
| 1492 | AGGAUCCCUUGGCUGGUAU | 497 | AGGAucccuuGGcuGGuAuTsT | 498 | AuACcAGCcAAGGGAUCCUTsT | AD-12296 |
| 1493 | GGAUCCCUUGGCUGGUAUA | 499 | GGAucccuuGGcuGGuAuATsT | 500 | uAuACcAGCcAAGGGAUCCTsT | AD-12297 |
| 1494 | CAAUAGUAGAAUGUGAUCC | 501 | cAAuAGuAGAAuGuGAuccTsT | 502 | GGAUcAcAUUCuACuAUUGTsT | AD-12298 |
| 1495 | GCUAUAAUUGCACUAUCUU | 503 | GcuAuAAuuGcAcuAucuuTsT | 504 | AAGAuAGUGcAAUuAuAGCTsT | AD-12299 |
| 1496 | UACCCUUCAUCAAAUUUUU | 505 | uAcccuucAucAAAuuuuuTsT | 506 | AAAAAUUUGAUGAAGGGuATsT | AD-12300 |
| 1497 | AGAACAUAUUGAAUAAGCC | 507 | AGAAcAuAuuGAAuAAGccTsT | 508 | GGCUuAUUcAAuAUGUUCUTsT | AD-12301 |
| 1498 | AAAUUGGUGCUGUUGAGGA | 509 | AAAuuGGuGcuGuuGAGGATsT | 510 | UCCUcAAcAGcACcAAUUUTsT | AD-12302 |
| 1499 | UGAAUAGGGUUACAGAGUU | 511 | uGAAuAGGGuuAcAGAGuuTsT | 512 | AACUCUGuAACCCuAUUcATsT | AD-12303 |
| 1500 | AAGAACUUGAAACCACUCA | 513 | AAGAAcuuGAAAccAcucATsT | 514 | UGAGUGGUUUcAAGUUCUUTsT | AD-12304 |
| 1501 | AAUAAAGCAGACCCAUUCC | 515 | AAuAAAGcAGAcccAuuccTsT | 516 | GGAAUGGGUCUGCUUuAUUTsT | AD-12305 |
| 1502 | AUACCCAUCAACACUGGUA | 517 | AuAcccAucAAcAcuGGuATsT | 518 | uACcAGUGUUGAUGGGuAUTsT | AD-12306 |
| 1503 | UGGAUUGUUCAUCAAUUGG | 519 | uGGAuuGuucAucAAuuGGTsT | 520 | CcAAUUGAUGAAcAAUCcATsT | AD-12307 |
| 1504 | UGGAGAGGUCUAAAGUGGA | 521 | uGGAGAGGucuAAAGuGGATsT | 522 | UCcACUUuAGACCUCUCcATsT | AD-12308 |
| 1505 | GUCAUCCCUAUAGUUCACU | 523 | GucAucccuAuAGuucAcuTsT | 524 | AGUGAACuAuAGGGAUGACTsT | AD-12309 |
| 1506 | AUAAUGGCUAUAAUUUCUC | 525 | AuAAuGGcuAuAAuuucucTsT | 526 | GAGAAAUuAuAGCcAUuAUTsT | AD-12310 |
| 1507 | AUCCCUUGGCUGGUAUAAU | 527 | AucccuuGGcuGGuAuAAuTsT | 528 | AUuAuACcAGCcAAGGGAUTsT | AD-12311 |
| 1508 | GGGCUAUAAUUGCACUAUC | 529 | GGGcuAuAAuuGcAcuAucTsT | 530 | GAuAGUGcAAUuAuAGCCCTsT | AD-12312 |
| 1509 | GAUUCUCUUGGAGGGCGUA | 531 | GAuucucuuGGAGGGcGuATsT | 532 | uACGCCCUCcAAGAGAAUCTsT | AD-12313 |
| 1510 | GCAUCUCUCAAUCUUGAGG | 533 | GcAucucucAAucuuGAGGTsT | 534 | CCUcAAGAUUGAGAGAUGCTsT | AD-12314 |
| 1511 | CAGCAGAAAUCUAAGGAUA | 535 | cAGcAGAAAucuAAGGAuATsT | 536 | uAUCCUuAGAUUUCUGCUGTsT | AD-12315 |
| 1512 | GUCAAGAGCCAUCUGUAGA | 537 | GucAAGAGccAucuGuAGATsT | 538 | UCuAcAGAUGGCUCUUGACTsT | AD-12316 |
| 1513 | AAACAGAGGCAUUAACACA | 539 | AAAcAGAGGcAuuAAcAcATsT | 540 | UGUGUuAAUGCCUCUGUUUTsT | AD-12317 |
| 1514 | AGCCCAGAUCAACCUUUAA | 541 | AGcccAGAucAAccuuuAATsT | 542 | UuAAAGGUUGAUCUGGGCUTsT | AD-12318 |
| 1515 | UAUUUUUGAUCUGGCAACC | 543 | uAuuuuuGAucuGGcAAccTsT | 544 | GGUUGCcAGAUcAAAAAuATsT | AD-12319 |
| 1516 | UGUUUGGAGCAUCUACUAA | 545 | uGuuuGGAGcAucuAcuAATsT | 546 | UuAGuAGAUGCUCcAAAcATsT | AD-12320 |
| 1517 | GAAAUUACAGUACACAACA | 547 | GAAAuuAcAGuAcAcAAcATsT | 548 | UGUUGUGuACUGuAAUUUCTsT | AD-12321 |
| 1518 | ACUUGACCAGUGUAAAUCU | 549 | AcuuGAccAGuGuAAAucuTsT | 550 | AGAUUuAcACUGGUcAAGUTsT | AD-12322 |
| 1519 | ACCAGUGUAAAUCUGACCU | 551 | AccAGuGuAAAucuGAccuTsT | 552 | AGGUcAGAUUuAcACUGGUTsT | AD-12323 |
| 1520 | AGAACAAUCAUUAGCAGCA | 553 | AGAAcAAucAuuAGcAGcATsT | 554 | UGCUGCuAAUGAUUGUUCUTsT | AD-12324 |
| 1521 | CAAUGUGGAAACCUAACUG | 555 | cAAuGuGGAAAccuAAcuGTsT | 556 | cAGUuAGGUUUCcAcAUUGTsT | AD-12325 |
| 1522 | ACCAAGAAGGUACAAAAUU | 557 | AccAAGAAGGuAcAAAAuuTsT | 558 | AAUUUUGuACCUUCUUGGUTsT | AD-12326 |
| 1523 | GGUACAAAAUUGGUUGAAG | 559 | GGuAcAAAAuuGGuuGAAGTsT | 560 | CUUcAACcAAUUUUGuACCTsT | AD-12327 |
| 1524 | GGUGUGGAUUGUUCAUCAA | 561 | GGuGuGGAuuGuucAucAATsT | 562 | UUGAUGAAcAAUCcAcACCTsT | AD-12328 |
| 1525 | AGAGUUCACAAAAAGCCCA | 563 | AGAGuucAcAAAAAGcccATsT | 564 | UGGGCUUUUUGUGAACUCUTsT | AD-12329 |
| 1526 | UGAUAGCUAAAUUAAACCA | 565 | uGAuAGcuAAAuuAAAccATsT | 566 | UGGUUuAAUUuAGCuAUcATsT | AD-12330 |
| 1527 | AAUAAGCCUGAAGUGAAUC | 567 | AAuAAGccuGAAGuGAAucTsT | 568 | GAUUcACUUcAGGCUuAUUTsT | AD-12331 |
| 1528 | CAGUUGACCAACACAAUGC | 569 | cAGuuGAccAAcAcAAuGcTsT | 570 | GcAUUGUGUUGGUcAACUGTsT | AD-12332 |
| 1529 | UGGUGUGGAUUGUUCAUCA | 571 | uGGuGuGGAuuGuucAucATsT | 572 | UGAUGAAcAAUCcAcACcATsT | AD-12333 |
| 1530 | AUUCACCCUGACAGAGUUC | 573 | AuucAcccuGAcAGAGuucTsT | 574 | GAACUCUGUcAGGGUGAAUTsT | AD-12334 |
| 1531 | UAAGACCUUAUUUGGUAAU | 575 | uAAGAccuuAuuuGGuAAuTsT | 576 | AUuACcAAAuAAGGUCUuATsT | AD-12335 |
| 1532 | AAGCAAUGUGGAAACCUAA | 577 | AAGcAAuGuGGAAAccuAATsT | 578 | UuAGGUUUCcAcAUUGCUUTsT | AD-12336 |
| 1533 | UCUGAAACUGGAUAUCCCA | 579 | ucuGAAAcuGGAuAucccATsT | 580 | UGGGAuAUCcAGUUUcAGATsT | AD-12337 |

TABLE 2b
Analysis of Eg5/KSP dsRNA duplexes

| | 1st single | | 2nd single | | | |
|---|---|---|---|---|---|---|
| | dose | | dose | | 3rd | |
| | screen @ | | screen @ | | single | |
| Eg5/KSP | 50 nM [% | SDs 1st screen | 25 nM [% | SDs 2nd screen | dose | SDs 3rd screen |
| duplex | resudual | (among | resudual | (among | screen | (among |
| Name | mRNA] | quadruplicates) | mRNA] | quadruplicates) | @ 25 nM | quadruplicates) |
| AD-12072 | 65% | 2% | 82% | 5% | | |
| AD-12073 | 84% | 1% | 61% | 6% | | |
| AD-12074 | 51% | 3% | 36% | 9% | | |
| AD-12075 | 56% | 4% | 36% | 4% | | |
| AD-12076 | 21% | 4% | 13% | 3% | | |
| AD-12077 | 11% | 2% | 6% | 1% | | |
| AD-12078 | 22% | 3% | 9% | 2% | | |
| AD-12079 | 22% | 10% | 15% | 7% | | |
| AD-12080 | 68% | 4% | 52% | 13% | | |
| AD-12081 | 34% | 8% | 35% | 24% | | |
| AD-12082 | 20% | 2% | 92% | 5% | | |
| AD-12083 | 85% | 6% | 63% | 10% | | |
| AD-12084 | 18% | 6% | 17% | 4% | | |
| AD-12085 | 13% | 4% | 12% | 4% | | |
| AD-12086 | 26% | 5% | 17% | 3% | | |
| AD-12087 | 95% | 4% | 80% | 4% | | |
| AD-12088 | 29% | 6% | 29% | 2% | | |
| AD-12089 | 69% | 5% | 64% | 7% | | |
| AD-12090 | 46% | 15% | 34% | 5% | | |
| AD-12091 | 16% | 6% | 17% | 3% | | |
| AD-12092 | 82% | 26% | 63% | 5% | | |
| AD-12093 | 84% | 4% | 70% | 4% | | |
| AD-12094 | 46% | 3% | 34% | 1% | | |
| AD-12095 | 14% | 2% | 13% | 1% | | |
| AD-12096 | 26% | 11% | 17% | 1% | | |
| AD-12097 | 23% | 2% | 21% | 1% | | |
| AD-12098 | 41% | 14% | 17% | 3% | | |
| AD-12099 | 57% | 2% | 48% | 6% | | |
| AD-12100 | 101% | 11% | 98% | 8% | | |
| AD-12101 | 46% | 7% | 32% | 2% | | |
| AD-12102 | 96% | 17% | 88% | 18% | | |
| AD-12103 | 19% | 5% | 20% | 2% | | |
| AD-12104 | 40% | 8% | 24% | 2% | | |
| AD-12105 | 39% | 2% | 36% | 10% | | |
| AD-12106 | 87% | 6% | 79% | 19% | | |
| AD-12107 | 29% | 2% | 32% | 16% | | |
| AD-12108 | 38% | 4% | 39% | 8% | | |
| AD-12109 | 49% | 3% | 44% | 10% | | |
| AD-12110 | 85% | 5% | 80% | 14% | | |
| AD-12111 | 64% | 6% | 71% | 18% | | |
| AD-12112 | 48% | 4% | 41% | 5% | | |
| AD-12113 | 13% | 0% | 14% | 3% | | |
| AD-12114 | 32% | 6% | 16% | 4% | | |
| AD-12115 | 8% | 4% | 7% | 5% | | |
| AD-12116 | 74% | 5% | 61% | 7% | | |
| AD-12117 | 21% | 4% | 20% | 2% | | |
| AD-12118 | 44% | 4% | 42% | 6% | | |
| AD-12119 | 37% | 4% | 24% | 3% | | |
| AD-12120 | 22% | 2% | 15% | 4% | | |
| AD-12121 | 32% | 1% | 22% | 2% | | |
| AD-12122 | 36% | 16% | 19% | 5% | | |
| AD-12123 | 28% | 1% | 16% | | | |
| AD-12124 | 28% | 2% | 16% | | | |
| AD-12125 | 15% | 1% | 14% | | | |
| AD-12126 | 51% | 22% | 27% | | | |
| AD-12127 | 54% | 4% | 42% | 9% | | |
| AD-12128 | 29% | 1% | 20% | 2% | | |
| AD-12129 | 22% | 3% | 19% | 3% | | |
| AD-12130 | 53% | 6% | 42% | 7% | | |
| AD-12131 | 28% | 5% | 22% | 3% | | |
| AD-12132 | 88% | 2% | 90% | 18% | | |
| AD-12133 | 34% | 2% | 26% | 6% | | |
| AD-12134 | 18% | 3% | 14% | 2% | | |
| AD-12135 | 50% | 6% | 37% | 4% | | |
| AD-12136 | 42% | 19% | 22% | 2% | | |
| AD-12137 | 85% | 12% | 92% | 4% | | |
| AD-12138 | 47% | 6% | 49% | 1% | | |
| AD-12139 | 80% | 5% | 72% | 4% | | |
| AD-12140 | 97% | 22% | 67% | 9% | | |
| AD-12141 | 120% | 4% | 107% | 10% | | |
| AD-12142 | 55% | 8% | 33% | 4% | | |
| AD-12143 | 64% | 34% | 19% | 2% | | |
| AD-12144 | 58% | 29% | 17% | 2% | | |
| AD-12145 | 27% | 8% | 18% | 2% | | |
| AD-12146 | 19% | 20% | 15% | 1% | | |
| AD-12147 | 29% | 9% | 35% | 3% | | |
| AD-12148 | 30% | 3% | 56% | 5% | | |
| AD-12149 | 8% | 2% | 12% | 3% | | |
| AD-12150 | 31% | 2% | 31% | 7% | | |
| AD-12151 | 9% | 5% | 14% | 2% | | |
| AD-12152 | 3% | 3% | 23% | 3% | | |
| AD-12153 | 20% | 6% | 34% | 4% | | |
| AD-12154 | 24% | 7% | 44% | 3% | | |
| AD-12155 | 33% | 6% | 53% | 11% | | |
| AD-12156 | 35% | 5% | 40% | 5% | | |
| AD-12157 | 8% | 3% | 23% | 4% | | |
| AD-12158 | 13% | 2% | 22% | 5% | | |
| AD-12159 | 34% | 6% | 46% | 5% | | |
| AD-12160 | 19% | 3% | 31% | 4% | | |
| AD-12161 | 88% | 4% | 83% | 7% | | |
| AD-12162 | 26% | 7% | 32% | 7% | | |
| AD-12163 | 55% | 9% | 40% | 3% | | |
| AD-12164 | | | 21% | 3% | | |
| AD-12165 | 30% | 3% | 41% | 4% | | |
| AD-12166 | 9% | 10% | 22% | 9% | | |
| AD-12167 | 26% | 3% | 30% | 2% | | |
| AD-12168 | 54% | 4% | 59% | 20% | | |
| AD-12169 | 41% | 4% | 51% | 16% | | |
| AD-12170 | 43% | 4% | 52% | 20% | | |
| AD-12171 | 67% | 3% | 73% | 25% | | |
| AD-12172 | 53% | 15% | 37% | 2% | | |
| AD-12173 | 39% | 0% | 39% | 0% | | |
| AD-12174 | 41% | 5% | 27% | 0% | | |
| AD-12175 | 29% | 0% | 38% | 14% | | |
| AD-12176 | 43% | 2% | 56% | 25% | | |
| AD-12177 | 68% | 6% | 74% | 30% | | |
| AD-12178 | 41% | 4% | 41% | 6% | | |
| AD-12179 | 53% | 5% | 44% | 5% | | |
| AD-12180 | 16% | 2% | 13% | 4% | | |
| AD-12181 | 19% | 3% | 14% | 2% | | |
| AD-12182 | 16% | 4% | 18% | 8% | | |
| AD-12183 | 26% | 3% | 19% | 4% | | |
| AD-12184 | 54% | 2% | 77% | 8% | | |
| AD-12185 | 8% | 1% | 9% | 1% | | |
| AD-12186 | 36% | 3% | 41% | 6% | | |
| AD-12187 | 34% | 17% | 27% | 1% | | |
| AD-12188 | 30% | 3% | 27% | 4% | | |
| AD-12189 | 51% | 4% | 48% | 5% | | |
| AD-12190 | 33% | 2% | 26% | 4% | | |
| AD-12191 | 20% | 2% | 13% | 0% | | |
| AD-12192 | 21% | 1% | 23% | 10% | | |
| AD-12193 | 64% | 8% | 98% | 6% | | |
| AD-12194 | 8% | 2% | 15% | 4% | | |
| AD-12195 | 34% | 2% | 48% | 3% | | |
| AD-12196 | 34% | 2% | 51% | 3% | | |
| AD-12197 | 75% | 4% | 93% | 6% | | |
| AD-12198 | 55% | 5% | 48% | 2% | | |
| AD-12199 | 102% | 6% | 118% | 9% | | |
| AD-12200 | 75% | 6% | 60% | 12% | | |
| AD-12201 | 42% | 3% | 16% | 4% | | |
| AD-12202 | 29% | 4% | 9% | 3% | | |
| AD-12203 | 114% | 14% | 89% | 20% | | |
| AD-12204 | 64% | 7% | 26% | 5% | | |
| AD-12205 | 66% | 12% | 35% | 4% | | |
| AD-12206 | 46% | 3% | 32% | 12% | | |
| AD-12207 | 57% | 5% | 40% | 6% | | |
| AD-12208 | 30% | 8% | 10% | 5% | | |
| AD-12209 | 101% | 6% | 102% | 23% | | |
| AD-12210 | 38% | 11% | 27% | 14% | | |
| AD-12211 | 16% | 6% | 10% | 5% | | |
| AD-12212 | 59% | 8% | 65% | 5% | | |
| AD-12213 | 24% | 9% | 12% | 2% | | |
| AD-12214 | 67% | 14% | 70% | 12% | | |
| AD-12215 | 29% | 13% | 13% | 4% | | |
| AD-12216 | 36% | 4% | 13% | 1% | | |
| AD-12217 | 36% | 9% | 11% | 2% | | |
| AD-12218 | 35% | 5% | 17% | 3% | | |
| AD-12219 | 41% | 9% | 14% | 1% | | |
| AD-12220 | 37% | 5% | 23% | 3% | | |
| AD-12221 | 58% | 7% | 39% | 6% | | |
| AD-12222 | 74% | 9% | 53% | 3% | | |
| AD-12223 | 74% | 10% | 67% | 7% | | |
| AD-12224 | 24% | 2% | 11% | 2% | | |
| AD-12225 | 75% | 5% | 76% | 14% | | |
| AD-12226 | 45% | 8% | 40% | 3% | | |
| AD-12227 | 61% | 6% | 47% | 5% | | |
| AD-12228 | 28% | 3% | 25% | 5% | | |
| AD-12229 | 54% | 13% | 37% | 6% | | |
| AD-12230 | 70% | 17% | 65% | 4% | | |
| AD-12231 | 32% | 12% | 22% | 6% | | |
| AD-12232 | 30% | 3% | 17% | 2% | | |
| AD-12233 | 38% | 2% | 32% | 3% | | |
| AD-12234 | 90% | 5% | 95% | 7% | | |
| AD-12235 | 57% | 7% | 46% | 3% | | |
| AD-12236 | 34% | 8% | 16% | 2% | | |
| AD-12237 | 42% | 9% | 32% | 8% | | |
| AD-12238 | 42% | 6% | 34% | 6% | | |
| AD-12239 | 42% | 3% | 40% | 4% | | |
| AD-12240 | 47% | 6% | 36% | 5% | | |
| AD-12241 | 69% | 5% | 70% | 8% | | |
| AD-12242 | 61% | 2% | 47% | 3% | | |
| AD-12243 | 26% | 7% | 15% | 1% | | |
| AD-12244 | 25% | 6% | 15% | 1% | | |
| AD-12245 | 65% | 6% | 83% | 13% | | |
| AD-12246 | 29% | 7% | 31% | 6% | | |
| AD-12247 | 57% | 13% | 50% | 3% | | |
| AD-12248 | 36% | 8% | 20% | 3% | 15% | 7% |
| AD-12249 | 44% | 3% | 70% | 11% | 103% | 34% |
| AD-12250 | 47% | 5% | 18% | 5% | 17% | 4% |
| AD-12251 | 121% | 28% | 35% | 8% | 60% | 42% |
| AD-12252 | 94% | 19% | 8% | 3% | 5% | 3% |
| AD-12253 | 94% | 33% | 42% | 8% | 49% | 27% |
| AD-12254 | 101% | 58% | 70% | 5% | 80% | 32% |
| AD-12255 | 163% | 27% | 28% | 6% | 36% | 10% |
| AD-12256 | 112% | 62% | 18% | 3% | 9% | 4% |
| AD-12257 | 10% | 4% | 9% | 2% | 6% | 2% |
| AD-12258 | 27% | 9% | 18% | 3% | 20% | 6% |
| AD-12259 | 20% | 5% | 12% | 2% | 13% | 5% |
| AD-12260 | 22% | 7% | 81% | 7% | 65% | 13% |
| AD-12261 | 122% | 11% | 66% | 7% | 80% | 22% |
| AD-12262 | 97% | 30% | 33% | 6% | 44% | 18% |
| AD-12263 | 177% | 57% | 85% | 11% | 84% | 15% |
| AD-12264 | 37% | 6% | 10% | 1% | 10% | 4% |
| AD-12265 | 40% | 8% | 17% | 1% | 20% | 10% |
| AD-12266 | 33% | 9% | 9% | 1% | 8% | 4% |
| AD-12267 | 34% | 13% | 11% | 1% | 6% | 2% |
| AD-12268 | 34% | 6% | 11% | 1% | 9% | 2% |
| AD-12269 | 54% | 6% | 33% | 4% | 29% | 7% |
| AD-12270 | 52% | 5% | 29% | 4% | 27% | 6% |
| AD-12271 | 53% | 7% | 27% | 3% | 19% | 6% |
| AD-12272 | 85% | 15% | 57% | 7% | 51% | 16% |
| AD-12273 | 36% | 6% | 26% | 2% | 30% | 5% |
| AD-12274 | 75% | 21% | 40% | 2% | 50% | 19% |
| AD-12275 | 29% | 9% | 8% | 1% | 8% | 4% |
| AD-12276 | 45% | 19% | 15% | 2% | 16% | 12% |
| AD-12277 | 58% | 17% | 32% | 2% | 55% | 14% |
| AD-12278 | 120% | 35% | 96% | 10% | 124% | 38% |
| AD-12279 | 47% | 29% | 17% | 1% | 12% | 4% |
| AD-12280 | 2% | 0% | 3% | 1% | | |
| AD-12281 | 2% | 0% | 5% | 2% | | |
| AD-12282 | 3% | 0% | 25% | 5% | | |
| AD-12283 | 3% | 1% | 35% | 4% | | |
| AD-12284 | 5% | 2% | 49% | 8% | | |
| AD-12285 | 7% | 7% | 21% | 26% | | |
| AD-12286 | 28% | 34% | 12% | 7% | | |
| AD-12287 | 40% | 21% | 51% | 23% | | |
| AD-12288 | 26% | 7% | 155% | 146% | | |
| AD-12289 | 43% | 21% | 220% | 131% | | |
| AD-12290 | 2% | 1% | 81% | 23% | | |
| AD-12291 | 4% | 1% | 70% | 3% | | |
| AD-12292 | 2% | 1% | 6% | 2% | | |
| AD-12293 | 4% | 2% | 36% | 3% | | |
| AD-12294 | 10% | 6% | 38% | 3% | | |
| AD-12295 | 29% | 31% | 37% | 3% | | |
| AD-12296 | 82% | 4% | 89% | 2% | | |
| AD-12297 | 75% | 3% | 65% | 2% | | |
| AD-12298 | 73% | 4% | 60% | 3% | | |
| AD-12299 | 76% | 4% | 66% | 4% | | |
| AD-12300 | 36% | 4% | 15% | 1% | | |
| AD-12301 | 33% | 4% | 18% | 2% | | |
| AD-12302 | 66% | 5% | 65% | 3% | | |
| AD-12303 | 35% | 6% | 17% | 2% | | |
| AD-12304 | 70% | 8% | 70% | 6% | | |
| AD-12305 | 63% | 8% | 80% | 7% | | |
| AD-12306 | 23% | 6% | 20% | 3% | | |
| AD-12307 | 78% | 10% | 58% | 5% | | |
| AD-12308 | 27% | 8% | 15% | 2% | | |
| AD-12309 | 58% | 11% | 42% | 3% | | |
| AD-12310 | 106% | 23% | 80% | 2% | | |
| AD-12311 | 73% | 12% | 60% | 2% | | |
| AD-12312 | 39% | 3% | 36% | 3% | | |
| AD-12313 | 64% | 9% | 49% | 6% | | |
| AD-12314 | 28% | 7% | 14% | 6% | | |
| AD-12315 | 31% | 7% | 13% | 2% | | |
| AD-12316 | 42% | 5% | 14% | 2% | | |
| AD-12317 | 34% | 9% | 15% | 5% | | |
| AD-12318 | 46% | 4% | 28% | 4% | | |
| AD-12319 | 77% | 3% | 56% | 4% | | |
| AD-12320 | 55% | 7% | 41% | 3% | | |
| AD-12321 | 21% | 3% | 10% | 2% | | |
| AD-12322 | 27% | 8% | 30% | 12% | | |
| AD-12323 | 26% | 7% | 35% | 18% | | |
| AD-12324 | 27% | 8% | 27% | 14% | | |
| AD-12325 | 32% | 12% | 32% | 22% | | |
| AD-12326 | 42% | 22% | 45% | 41% | | |
| AD-12327 | 36% | 14% | 37% | 32% | | |
| AD-12328 | 45% | 2% | 31% | 3% | | |
| AD-12329 | 61% | 4% | 34% | 3% | | |
| AD-12330 | 63% | 5% | 38% | 4% | | |
| AD-12331 | 50% | 2% | 26% | 5% | | |
| AD-12332 | 80% | 4% | 51% | 7% | | |
| AD-12333 | 34% | 6% | 12% | 2% | | |
| AD-12334 | 27% | 2% | 18% | 3% | | |
| AD-12335 | 84% | 6% | 60% | 7% | | |
| AD-12336 | 45% | 4% | 36% | 4% | | |
| AD-12337 | 30% | 7% | 19% | 2% | | |

TABLE 3
Sequences and analysis of Eg5/KSP dsRNA duplexes

| | | | | | single | |
|---|---|---|---|---|---|---|
| | | | | | dose | SDs |
| | | | | | screen @ | 2nd |
| | | | | | 25 nM [% | screen |
| | SEQ ID | Antisense sequence (5′- | SEQ ID | duplex | residual | (among |
| Sense sequence (5′-3′) | NO. | 3′) | NO. | name | mRNA] | quadruplicates) |

| | | | | | | |
|---|---|---|---|---|---|---|
| ccAuuAcuAcAGuAGcAcuTsT | 582 | AGUGCuACUGuAGuAAUGGTsT | 583 | AD-14085 | 19% | 1% |
| AucuGGcAAccAuAuuucuTsT | 584 | AGAAAuAUGGUUGCcAGAUTsT | 585 | AD-14086 | 38% | 1% |
| GAuAGcuAAAuuAAAccAATsT | 586 | UUGGUUuAAUUuAGCuAUCTsT | 587 | AD-14087 | 75% | 10% |
| AGAuAccAuuAcuAcAGuATsT | 588 | uACUGuAGuAAUGGuAUCUTsT | 589 | AD-14088 | 22% | 8% |
| GAuuGuucAucAAuuGGcGTsT | 590 | CGCcAAUUGAUGAAcAAUCTsT | 591 | AD-14089 | 70% | 12% |
| GcuuucuccucGGcucAcuTsT | 592 | AGuGAGCCGAGGAGAAAGCTsT | 593 | AD-14090 | 79% | 11% |
| GGAGGAuuGGcuGAcAAGATsT | 594 | UCUUGUcAGCcAAUCCUCCTsT | 595 | AD-14091 | 29% | 3% |
| uAAuGAAGAGuAuAccuGGTsT | 596 | CcAGGuAuACUCUUcAUuATsT | 597 | AD-14092 | 23% | 2% |
| uuucAccAAAccAuuuGuATsT | 598 | uAcAAAUGGUUUGGUGAAATsT | 599 | AD-14093 | 60% | 2% |
| cuuAuuAAGGAGuAuAcGGTsT | 600 | CCGuAuACUCCUuAAuAAGTsT | 601 | AD-14094 | 11% | 3% |
| GAAAucAGAuGGAcGuAAGTsT | 602 | CUuACGUCcAUCUGAUUUCTsT | 603 | AD-14095 | 10% | 2% |
| cAGAuGucAGcAuAAGcGATsT | 604 | UCGCUuAUGCUGAcAUCUGTsT | 605 | AD-14096 | 27% | 2% |
| AucuAAcccuAGuuGuAucTsT | 606 | GAuAcAACuAGGGUuAGAUTsT | 607 | AD-14097 | 45% | 6% |
| AAGAGcuuGuuAAAAucGGTsT | 608 | CCGAUUUuAAcAAGCUCUUTsT | 609 | AD-14098 | 50% | 10% |
| uuAAGGAGuAuAcGGAGGATsT | 610 | UCCUCCGuAuACUCCUuAATsT | 611 | AD-14099 | 12% | 4% |
| uuGcAAuGuAAAuAcGuAuTsT | 612 | AuACGuAUUuAcAUUGcAATsT | 613 | AD-14100 | 49% | 7% |
| ucuAAcccuAGuuGuAuccTsT | 614 | GGAuAcAACuAGGGUuAGATsT | 615 | AD-14101 | 36% | 1% |
| cAuGuAucuuuuucucGAuTsT | 616 | AUCGAGAAAAAGAuAcAUGTsT | 617 | AD-14102 | 49% | 3% |
| GAuGucAGcAuAAGcGAuGTsT | 618 | cAUCGCUuAUGCUGAcAUCTsT | 619 | AD-14103 | 74% | 5% |
| ucccAAcAGGuAcGAcAccTsT | 620 | GGUGUCGuACCUGUUGGGATsT | 621 | AD-14104 | 27% | 3% |
| uGcucAcGAuGAGuuuAGuTsT | 622 | ACuAAACUcAUCGUGAGcATsT | 623 | AD-14105 | 34% | 4% |
| AGAGcuuGuuAAAAucGGATsT | 624 | UCCGAUUUuAAcAAGCUCUTsT | 625 | AD-14106 | 9% | 2% |
| GcGuAcAAGAAcAucuAuATsT | 626 | uAuAGAUGUUCUUGuACGCTsT | 627 | AD-14107 | 5% | 1% |
| GAGGuuGuAAGccAAuGuuTsT | 628 | AAcAUUGGCUuAcAACCUCTsT | 629 | AD-14108 | 15% | 1% |
| AAcAGGuAcGAcAccAcAGTsT | 630 | CUGUGGUGUCGuACCUGUUTsT | 631 | AD-14109 | 91% | 2% |
| AAcccuAGuuGuAucccucTsT | 632 | GAGGGAuAcAACuAGGGUUTsT | 633 | AD-14110 | 66% | 5% |
| GcAuAAGcGAuGGAuAAuATsT | 634 | uAUuAUCcAUCGCUuAUGCTsT | 635 | AD-14111 | 33% | 3% |
| AAGcGAuGGAuAAuAccuATsT | 636 | uAGGuAUuAUCcAUCGCUUTsT | 637 | AD-14112 | 51% | 3% |
| uGAuccuGuAcGAAAAGAATsT | 638 | UUCUUUUCGuAcAGGAUcATsT | 639 | AD-14113 | 22% | 3% |
| AAAAcAuuGGccGuucuGGTsT | 640 | CcAGAACGGCcAAUGUUUUTsT | 641 | AD-14114 | 117% | 8% |
| cuuGGAGGGcGuAcAAGAATsT | 642 | UUCUUGuACGCCCUCcAAGTsT | 643 | AD-14115 | 50% | 8% |
| GGcGuAcAAGAAcAucuAuTsT | 644 | AuAGAUGUUCUUGuACGCCTsT | 645 | AD-14116 | 14% | 3% |
| AcucuGAGuAcAuuGGAAuTsT | 646 | AUUCcAAUGuACUcAGAGUTsT | 647 | AD-14117 | 12% | 4% |
| uuAuuAAGGAGuAuAcGGATsT | 648 | UCCGuAuACUCCUuAAuAATsT | 649 | AD-14118 | 26% | 4% |
| uAAGGAGuAuAcGGAGGAGTsT | 650 | CUCCUCCGuAuACUCCUuATsT | 651 | AD-14119 | 24% | 5% |
| AAAucAAuAGucAAcuAAATsT | 652 | UUuAGUUGACuAUUGAUUUTsT | 653 | AD-14120 | 8% | 1% |
| AAucAAuAGucAAcuAAAGTsT | 654 | CUUuAGUUGACuAUUGAUUTsT | 655 | AD-14121 | 24% | 2% |
| uucucAGuAuAcuGuGuAATsT | 656 | UuAcAcAGuAuACUGAGAATsT | 657 | AD-14122 | 10% | 1% |
| uGuGAAAcAcucuGAuAAATsT | 658 | UUuAUcAGAGUGUUUCAcATsT | 659 | AD-14123 | 8% | 1% |
| AGAuGuGAAucucuGAAcATsT | 660 | UGUUcAGAGAUUcAcAUCUTsT | 661 | AD-14124 | 9% | 2% |
| AGGuuGuAAGccAAuGuuGTsT | 662 | cAAcAUUGGCUuAcAACCUTsT | 663 | AD-14125 | 114% | 6% |
| uGAGAAAucAGAuGGAcGuTsT | 664 | ACGUCcAUCUGAUUUCUcATsT | 665 | AD-14126 | 9% | 1% |
| AGAAAucAGAuGGAcGuAATsT | 666 | UuACGUCcAUCUGAUUUCUTsT | 667 | AD-14127 | 57% | 6% |
| AuAucccAAcAGGuAcGAcTsT | 668 | GUCGuACCUGUUGGGAuAUTsT | 669 | AD-14128 | 104% | 6% |
| cccAAcAGGuAcGAcAccATsT | 670 | UGGUGUCGuACCUGUUGGGTsT | 671 | AD-14129 | 21% | 2% |
| AGuAuAcuGAAGAAccucuTsT | 672 | AGAGGUUCUUcAGuAuACUTsT | 673 | AD-14130 | 57% | 6% |
| AuAuAuAucAGccGGGcGcTsT | 674 | GCGCCCGGCUGAuAuAuAUTsT | 675 | AD-14131 | 93% | 6% |
| AAucuAAcccuAGuuGuAuTsT | 676 | AuAcAACuAGGGUuAGAUUTsT | 677 | AD-14132 | 75% | 8% |
| cuAAcccuAGuuGuAucccTsT | 678 | GGGAuAcAACuAGGGUuAGTsT | 679 | AD-14133 | 66% | 4% |
| cuAGuuGuAucccuccuuuTsT | 680 | AAAGGAGGGAuAcAACuAGTsT | 681 | AD-14134 | 44% | 6% |
| AGAcAucuGAcuAAuGGcuTsT | 682 | AGCcAUuAGUcAGAUGUCUTsT | 683 | AD-14135 | 55% | 6% |
| GAAGcucAcAAuGAuuuAATsT | 684 | UuAAAUcAUUGUGAGCUUCTsT | 685 | AD-14136 | 29% | 3% |
| AcAuGuAucuuuuucucGATsT | 686 | UCGAGAAAAAGAuAcAUGUTsT | 687 | AD-14137 | 40% | 3% |
| ucGAuucAAAucuuAAcccTsT | 688 | GGGUuAAGAUUUGAAUCGATsT | 689 | AD-14138 | 39% | 5% |
| ucuuAAcccuuAGGAcucuTsT | 690 | AGAGUCCuAAGGGUuAAGATsT | 691 | AD-14139 | 71% | 11% |
| GcucAcGAuGAGuuuAGuGTsT | 692 | cACuAAACUcAUCGUGAGCTsT | 693 | AD-14140 | 43% | 15% |
| cAuAAGcGAuGGAuAAuAcTsT | 694 | GuAUuAUCcAUCGCUuAUGTsT | 695 | AD-14141 | 33% | 6% |
| AuAAGcGAuGGAuAAuAccTsT | 696 | GGuAUuAUCcAUCGCUuAUTsT | 697 | AD-14142 | 51% | 14% |
| ccuAAuAAAcuGcccucAGTsT | 698 | CUGAGGGcAGUUuAUuAGGTsT | 699 | AD-14143 | 42% | 1% |
| ucGGAAAGuuGAAcuuGGuTsT | 700 | ACcAAGUUcAACUUUCCGATsT | 701 | AD-14144 | 4% | 4% |
| GAAAAcAuuGGccGuucuGTsT | 702 | cAGAACGGCcAAUGUUUUCTsT | 703 | AD-14145 | 92% | 5% |
| AAGAcuGAucuucuAAGuuTsT | 704 | AACUuAGAAGAUcAGUCUUTsT | 705 | AD-14146 | 13% | 2% |
| GAGcuuGuuAAAAucGGAATsT | 706 | UUCCGAUUUuAAcAAGCUCTsT | 707 | AD-14147 | 8% | 1% |
| AcAuuGGccGuucuGGAGcTsT | 708 | GCUCcAGAACGGCcAAUGUTsT | 709 | AD-14148 | 80% | 7% |
| AAGAAcAucuAuAAuuGcATsT | 710 | UGcAAUuAuAGAUGUUCUUTsT | 711 | AD-14149 | 44% | 7% |
| AAAuGuGucuAcucAuGuuTsT | 712 | AAcAUGAGuAGAcAcAUUUTsT | 713 | AD-14150 | 32% | 29% |
| uGucuAcucAuGuuucucATsT | 714 | UGAGAAAcAUGAGuAGAcATsT | 715 | AD-14151 | 75% | 11% |
| GuAuAcuGuGuAAcAAucuTsT | 716 | AGAUUGUuAcAcAGuAuACTsT | 717 | AD-14152 | 8% | 5% |
| uAuAcuGuGuAAcAAucuATsT | 718 | uAGAUUGUuAcAcAGuAuATsT | 719 | AD-14153 | 17% | 11% |
| cuuAGuAGuGuccAGGAAATsT | 720 | UUUCCUGGAcACuACuAAGTsT | 721 | AD-14154 | 16% | 4% |
| ucAGAuGGAcGuAAGGcAGTsT | 722 | CUGCCUuACGUCcAUCUGATsT | 723 | AD-14155 | 11% | 1% |
| AGAuAAAuuGAuAGcAcAATsT | 724 | UUGUGCuAUcAAUUuAUCUTsT | 725 | AD-14156 | 10% | 1% |
| cAAcAGGuAcGAcAccAcATsT | 726 | UGUGGUGUCGuACCUGUUGTsT | 727 | AD-14157 | 29% | 3% |
| uGcAAuGuAAAuAcGuAuuTsT | 728 | AAuACGuAUUuAcAUUGcATsT | 729 | AD-14158 | 51% | 3% |
| AGucAGAAuuuuAucuAGATsT | 730 | UCuAGAuAAAAUUCUGACUTsT | 731 | AD-14159 | 53% | 5% |
| cuAGAAAucuuuuAAcAccTsT | 732 | GGUGUuAAAAGAUUUCuAGTsT | 733 | AD-14160 | 40% | 3% |
| AAuAAAucuAAcccuAGuuTsT | 734 | AACuAGGGUuAGAUUuAUUTsT | 735 | AD-14161 | 83% | 7% |
| AAuuuucuGcucAcGAuGATsT | 736 | UcAUCGUGAGcAGAAAAUUTsT | 737 | AD-14162 | 44% | 6% |
| GcccucAGuAAAuccAuGGTsT | 738 | CcAUGGAUUuACUGAGGGCTsT | 739 | AD-14163 | 57% | 3% |
| AcGuuuAAAAcGAGAucuuTsT | 740 | AAGAUCUCGUUUuAAACGUTsT | 741 | AD-14164 | 4% | 1% |
| AGGAGAuAGAAcGuuuAAATsT | 742 | UUuAAACGUUCuAUCUCCUTsT | 743 | AD-14165 | 11% | 1% |
| GAccGucAuGGcGucGcAGTsT | 744 | CUGCGACGCcAUGACGGUCTsT | 745 | AD-14166 | 90% | 5% |
| AccGucAuGGcGucGcAGcTsT | 746 | GCUGCGACGCcAUGACGGUTsT | 747 | AD-14167 | 49% | 1% |
| GAAcGuuuAAAAcGAGAucTsT | 748 | GAUCUCGUUUuAAACGUUCTsT | 749 | AD-14168 | 12% | 2% |
| uuGAGcuuAAcAuAGGuAATsT | 750 | UuACCuAUGUuAAGCUcAATsT | 751 | AD-14169 | 66% | 4% |
| AcuAAAuuGAucucGuAGATsT | 752 | UCuACGAGAUcAAUUuAGUTsT | 753 | AD-14170 | 52% | 6% |
| ucGuAGAAuuAucuuAAuATsT | 754 | uAUuAAGAuAAUUCuACGATsT | 755 | AD-14171 | 42% | 4% |
| GGAGAuAGAAcGuuuAAAATsT | 756 | UUUuAAACGUUCuAUCUCCTsT | 757 | AD-14172 | 3% | 1% |
| AcAAcuuAuuGGAGGuuGuTsT | 758 | AcAACCUCcAAuAAGUUGUTsT | 759 | AD-14173 | 29% | 2% |
| uGAGcuuAAcAuAGGuAAATsT | 760 | UUuACCuAUGUuAAGCUcATsT | 761 | AD-14174 | 69% | 2% |
| AucucGuAGAAuuAucuuATsT | 762 | uAAGAuAAUUCuACGAGAUTsT | 763 | AD-14175 | 53% | 3% |
| cuGcGuGcAGucGGuccucTsT | 764 | GAGGACCGACUGcACGcAGTsT | 765 | AD-14176 | 111% | 4% |
| cAcGcAGcGcccGAGAGuATsT | 766 | uACUCUCGGGCGCUGCGUGTsT | 767 | AD-14177 | 87% | 6% |
| AGuAccAGGGAGAcuccGGTsT | 768 | CCGGAGUCUCCCUGGuACUTsT | 769 | AD-14178 | 59% | 2% |
| AcGGAGGAGAuAGAAcGuuTsT | 770 | AACGUUCuAUCUCCUCCGUTsT | 771 | AD-14179 | 9% | 2% |
| AGAAcGuuuAAAAcGAGAuTsT | 772 | AUCUCGUUUuAAACGUUCUTsT | 773 | AD-14180 | 43% | 2% |
| AAcGuuuAAAAcGAGAucuTsT | 774 | AGAUCUCGUUUuAAACGUUTsT | 775 | AD-14181 | 70% | 10% |
| AGcuuGAGcuuAAcAuAGGTsT | 776 | CCuAUGUuAAGCUcAAGCUTsT | 777 | AD-14182 | 100% | 7% |
| AGcuuAAcAuAGGuAAAuATsT | 778 | uAUUuACCuAUGUuAAGCUTsT | 779 | AD-14183 | 60% | 5% |
| uAGAGcuAcAAAAccuAucTsT | 780 | GAuAGGUUUUGuAGCUCuATsT | 781 | AD-14184 | 129% | 6% |
| uAGuuGuAucccuccuuuATsT | 782 | uAAAGGAGGGAuAcAACuATsT | 783 | AD-14185 | 62% | 4% |
| AccAcccAGAcAucuGAcuTsT | 784 | AGUcAGAUGUCUGGGUGGUTsT | 785 | AD-14186 | 42% | 3% |
| AGAAAcuAAAuuGAucucGTsT | 786 | CGAGAUcAAUUuAGUUUCUTsT | 787 | AD-14187 | 123% | 12% |
| ucucGuAGAAuuAucuuAATsT | 788 | UuAAGAuAAUUCuACGAGATsT | 789 | AD-14188 | 38% | 2% |
| cAAcuuAuuGGAGGuuGuATsT | 790 | uAcAACCUCcAAuAAGUUGTsT | 791 | AD-14189 | 13% | 1% |
| uuGuAucccuccuuuAAGuTsT | 792 | ACUuAAAGGAGGGAuAcAATsT | 793 | AD-14190 | 59% | 3% |
| ucAcAAcuuAuuGGAGGuuTsT | 794 | AACCUCcAAuAAGUUGUGATsT | 795 | AD-14191 | 93% | 3% |
| AGAAcuGuAcucuucucAGTsT | 796 | CUGAGAAGAGuAcAGUUCUTsT | 797 | AD-14192 | 45% | 5% |
| GAGcuuAAcAuAGGuAAAuTsT | 798 | AUUuACCuAUGUuAAGCUCTsT | 799 | AD-14193 | 57% | 3% |
| cAccAAcAucuGuccuuAGTsT | 800 | CuAAGGAcAGAUGUUGGUGTsT | 801 | AD-14194 | 51% | 4% |
| AAAGcccAcuuuAGAGuAuTsT | 802 | AuACUCuAAAGUGGGCUUUTsT | 803 | AD-14195 | 77% | 5% |
| AAGcccAcuuuAGAGuAuATsT | 804 | uAuACUCuAAAGUGGGCUUTsT | 805 | AD-14196 | 42% | 6% |
| GAccuuAuuuGGuAAucuGTsT | 806 | cAGAUuACcAAAuAAGGUCTsT | 807 | AD-14197 | 15% | 2% |
| GAuuAAuGuAcucAAGAcuTsT | 808 | AGUCUUGAGuAcAUuAAUCTsT | 809 | AD-14198 | 12% | 2% |
| cuuuAAGAGGccuAAcucATsT | 810 | UGAGUuAGGCCUCUuAAAGTsT | 811 | AD-14199 | 18% | 2% |
| uuAAAccAAAcccuAuuGATsT | 812 | UcAAuAGGGUUUGGUUuAATsT | 813 | AD-14200 | 72% | 9% |
| ucuGuuGGAGAucuAuAAuTsT | 814 | AUuAuAGAUCUCcAAcAGATsT | 815 | AD-14201 | 9% | 3% |
| cuGAuGuuucuGAGAGAcuTsT | 816 | AGUCUCUcAGAAAcAUcAGTsT | 817 | AD-14202 | 25% | 3% |
| GcAuAcucuAGucGuucccTsT | 818 | GGGAACGACuAGAGuAUGCTsT | 819 | AD-14203 | 21% | 1% |
| GuuccuuAucGAGAAucuATsT | 820 | uAGAUUCUCGAuAAGGAACTsT | 821 | AD-14204 | 4% | 2% |
| GcAcuuGGAucucucAcAuTsT | 822 | AUGUGAGAGAUCcAAGUGCTsT | 823 | AD-14205 | 5% | 1% |
| AAAAAAGGAAcuAGAuGGcTsT | 824 | GCcAUCuAGUUCCUUUUUUTsT | 825 | AD-14206 | 79% | 6% |
| AGAGcAGAuuAccucuGcGTsT | 826 | CGcAGAGGuAAUCUGCUCUTsT | 827 | AD-14207 | 55% | 2% |
| AGcAGAuuAccucuGcGAGTsT | 828 | CUCGcAGAGGuAAUCUGCUTsT | 829 | AD-14208 | 100% | 4% |
| cccuGAcAGAGuucAcAAATsT | 830 | UUUGUGAACUCUGUcAGGGTsT | 831 | AD-14209 | 34% | 3% |
| GuuuAccGAAGuGuuGuuuTsT | 832 | AAAcAAcACUUCGGuAAACTsT | 833 | AD-14210 | 13% | 2% |
| uuAcAGuAcAcAAcAAGGATsT | 834 | UCCUUGUUGUGuACUGuAATsT | 835 | AD-14211 | 9% | 1% |
| AcuGGAucGuAAGAAGGcATsT | 836 | UGCCUUCUuACGAUCcAGUTsT | 837 | AD-14212 | 20% | 3% |
| GAGcAGAuuAccucuGcGATsT | 838 | UCGcAGAGGuAAUCUGCUCTsT | 839 | AD-14213 | 48% | 5% |
| AAAAGAAGuuAGuGuAcGATsT | 840 | UCGuAcACuAACUUCUUUUTsT | 841 | AD-14214 | 28% | 18% |
| GAccAuuuAAuuuGGcAGATsT | 842 | UCUGCcAAAUuAAAUGGUCTsT | 843 | AD-14215 | 132% | 0% |
| GAGAGGAGuGAuAAuuAAATsT | 844 | UUuAAUuAUcACUCCUCUCTsT | 845 | AD-14216 | 3% | 0% |
| cuGGAGGAuuGGcuGAcAATsT | 846 | UUGUcAGCcAAUCCUCcAGTsT | 847 | AD-14217 | 19% | 1% |
| cucuAGucGuucccAcucATsT | 848 | UGAGUGGGAACGACuAGAGTsT | 849 | AD-14218 | 67% | 8% |
| GAuAccAuuAcuAcAGuAGTsT | 850 | CuACUGuAGuAAUGGuAUCTsT | 851 | AD-14219 | 76% | 4% |
| uucGucuGcGAAGAAGAAATsT | 852 | UUUCUUCUUCGcAGACGAATsT | 853 | AD-14220 | 33% | 8% |
| GAAAAGAAGuuAGuGuAcGTsT | 854 | CGuAcACuAACUUCUUUUCTsT | 855 | AD-14221 | 25% | 2% |
| uGAuGuuuAccGAAGuGuuTsT | 856 | AAcACUUCGGuAAAcAUcATsT | 857 | AD-14222 | 7% | 2% |
| uGuuuGuccAAuucuGGAuTsT | 858 | AUCcAGAAUUGGAcAAAcATsT | 859 | AD-14223 | 19% | 2% |
| AuGAAGAGuAuAccuGGGATsT | 860 | UCCcAGGuAuACUCUUcAUTsT | 861 | AD-14224 | 13% | 1% |
| GcuAcucuGAuGAAuGcAuTsT | 862 | AUGcAUUcAUcAGAGuAGCTsT | 863 | AD-14225 | 15% | 2% |
| GcccuuGuAGAAAGAAcAcTsT | 864 | GUGUUCUUUCuAcAAGGGCTsT | 865 | AD-14226 | 11% | 0% |
| ucAuGuuccuuAucGAGAATsT | 866 | UUCUCGAuAAGGAAcAUGATsT | 867 | AD-14227 | 5% | 1% |
| GAAuAGGGuuAcAGAGuuGTsT | 868 | cAACUCUGuAACCCuAUUCTsT | 869 | AD-14228 | 34% | 3% |
| cAAAcuGGAucGuAAGAAGTsT | 870 | CUUCUuACGAUCcAGUUUGTsT | 871 | AD-14229 | 15% | 2% |
| cuuAuuuGGuAAucuGcuGTsT | 872 | cAGcAGAUuACcAAAuAAGTsT | 873 | AD-14230 | 20% | 1% |
| AGcAAuGuGGAAAccuAAcTsT | 874 | GUuAGGUUUCcAcAUUGCUTsT | 875 | AD-14231 | 18% | 1% |
| AcAAuAAAGcAGAcccAuuTsT | 876 | AAUGGGUCUGCUUuAUUGUTsT | 877 | AD-14232 | 21% | 1% |
| AAccAcuuAGuAGuGuccATsT | 878 | UGGAcACuACuAAGUGGUUTsT | 879 | AD-14233 | 106% | 12% |
| AGucAAGAGccAucuGuAGTsT | 880 | CuAcAGAUGGCUCUUGACUTsT | 881 | AD-14234 | 35% | 3% |
| cucccuAGAcuucccuAuuTsT | 882 | AAuAGGGAAGUCuAGGGAGTsT | 883 | AD-14235 | 48% | 4% |
| AuAGcuAAAuuAAAccAAATsT | 884 | UUUGGUUuAAUUuAGCuAUTsT | 885 | AD-14236 | 23% | 3% |
| uGGcuGGuAuAAuuccAcGTsT | 886 | CGUGGAAUuAuACcAGCcATsT | 887 | AD-14237 | 79% | 9% |
| uuAuuuGGuAAucuGcuGuTsT | 888 | AcAGcAGAUuACcAAAuAATsT | 889 | AD-14238 | 92% | 7% |
| AAcuAGAuGGcuuucucAGTsT | 890 | CUGAGAAAGCcAUCuAGUUTsT | 891 | AD-14239 | 20% | 2% |
| ucAuGGcGucGcAGccAAATsT | 892 | UUUGGCUGCGACGCcAUGATsT | 893 | AD-14240 | 71% | 6% |
| AcuGGAGGAuuGGcuGAcATsT | 894 | UGUcAGCcAAUCCUCcAGUTsT | 895 | AD-14241 | 14% | 1% |
| cuAuAAuuGcAcuAucuuuTsT | 896 | AAAGAuAGUGcAAUuAuAGTsT | 897 | AD-14242 | 11% | 2% |
| AAAGGucAccuAAuGAAGATsT | 898 | UCUUcAUuAGGUGACCUUUTsT | 899 | AD-14243 | 11% | 1% |
| AuGAAuGcAuAcucuAGucTsT | 900 | GACuAGAGuAUGcAUUcAUTsT | 901 | AD-14244 | 15% | 2% |
| AAcAuAuuGAAuAAGccuGTsT | 902 | cAGGCUuAUUcAAuAUGUUTsT | 903 | AD-14245 | 80% | 7% |
| AAGAAGGcAGuuGAccAAcTsT | 904 | GUUGGUcAACUGCCUUCUUTsT | 905 | AD-14246 | 57% | 5% |
| GAuAcuAAAAGAAcAAucATsT | 906 | UGAUUGUUCUUUuAGuAUCTsT | 907 | AD-14247 | 9% | 3% |
| AuAcuGAAAAucAAuAGucTsT | 908 | GACuAUUGAUUUUcAGuAUTsT | 909 | AD-14248 | 39% | 4% |
| AAAAAGGAAcuAGAuGGcuTsT | 910 | AGCcAUCuAGUUCCUUUUUTsT | 911 | AD-14249 | 64% | 2% |
| GAAcuAGAuGGcuuucucATsT | 912 | UGAGAAAGCcAUCuAGUUCTsT | 913 | AD-14250 | 18% | 2% |
| GAAAccuAAcuGAAGAccuTsT | 914 | AGGUCUUcAGUuAGGUUUCTsT | 915 | AD-14251 | 56% | 6% |
| uAcccAucAAcAcuGGuAATsT | 916 | UuACcAGUGUUGAUGGGuATsT | 917 | AD-14252 | 48% | 6% |
| AuuuuGAuAucuAcccAuuTsT | 918 | AAUGGGuAGAuAUcAAAAUTsT | 919 | AD-14253 | 39% | 5% |
| AucccuAuAGuucAcuuuGTsT | 920 | cAAAGUGAACuAuAGGGAUTsT | 921 | AD-14254 | 44% | 8% |
| AuGGGcuAuAAuuGcAcuATsT | 922 | uAGUGcAAUuAuAGCCcAUTsT | 923 | AD-14255 | 108% | 8% |
| AGAuuAccucuGcGAGcccTsT | 924 | GGGCUCGcAGAGGuAAUCUTsT | 925 | AD-14256 | 108% | 6% |
| uAAuuccAcGuAcccuucATsT | 926 | UGAAGGGuACGUGGAAUuATsT | 927 | AD-14257 | 23% | 2% |
| GucGuucccAcucAGuuuuTsT | 928 | AAAACuGAGuGGGAACGACTsT | 929 | AD-14258 | 21% | 3% |
| AAAucAAucccuGuuGAcuTsT | 930 | AGUcAAcAGGGAUUGAUUUTsT | 931 | AD-14259 | 19% | 2% |
| ucAuAGAGcAAAGAAcAuATsT | 932 | uAUGUUCUUUGCUCuAUGATsT | 933 | AD-14260 | 10% | 1% |
| uuAcuAcAGuAGcAcuuGGTsT | 934 | CcAAGUGCuACUGuAGuAATsT | 935 | AD-14261 | 76% | 3% |
| AuGuGGAAAccuAAcuGAATsT | 936 | UUcAGUuAGGUUUCcAcAUTsT | 937 | AD-14262 | 13% | 2% |
| uGuGGAAAccuAAcuGAAGTsT | 938 | CUUcAGUuAGGUUUCcAcATsT | 939 | AD-14263 | 14% | 2% |
| ucuuccuuAAAuGAAAGGGTsT | 940 | CCCUUUcAUUuAAGGAAGATsT | 941 | AD-14264 | 65% | 3% |
| uGAAGAAccucuAAGucAATsT | 942 | UUGACUuAGAGGUUCUUcATsT | 943 | AD-14265 | 13% | 1% |
| AGAGGucuAAAGuGGAAGATsT | 944 | UCUUCcACUUuAGACCUCUTsT | 945 | AD-14266 | 18% | 3% |
| AuAucuAcccAuuuuucuGTsT | 946 | cAGAAAAAUGGGuAGAuAUTsT | 947 | AD-14267 | 50% | 9% |
| uAAGccuGAAGuGAAucAGTsT | 948 | CUGAUUcACUUcAGGCUuATsT | 949 | AD-14268 | 13% | 3% |
| AGAuGcAGAccAuuuAAuuTsT | 950 | AAUuAAAUGGUCUGcAUCUTsT | 951 | AD-14269 | 19% | 4% |
| AGuGuuGuuuGuccAAuucTsT | 952 | GAAUUGGAcAAAcAAcACUTsT | 953 | AD-14270 | 11% | 2% |
| cuAuAAuGAAGAGcuuuuuTsT | 954 | AAAAAGCUCUUcAUuAuAGTsT | 955 | AD-14271 | 11% | 1% |
| AGAGGAGuGAuAAuuAAAGTsT | 956 | CUUuAAUuAUcACUCCUCUTsT | 957 | AD-14272 | 7% | 1% |
| uuucucuGuuAcAAuAcAuTsT | 958 | AUGuAUUGuAAcAGAGAAATsT | 959 | AD-14273 | 14% | 2% |
| AAcAucuAuAAuuGcAAcATsT | 960 | UGUUGcAAUuAuAGAUGUUTsT | 961 | AD-14274 | 73% | 4% |
| uGcuAGAAGuAcAuAAGAcTsT | 962 | GUCUuAUGuACUUCuAGcATsT | 963 | AD-14275 | 10% | 1% |
| AAuGuAcucAAGAcuGAucTsT | 964 | GAUcAGUCUUGAGuAcAUUTsT | 965 | AD-14276 | 89% | 2% |
| GuAcucAAGAcuGAucuucTsT | 966 | GAAGAUcAGUCUUGAGuACTsT | 967 | AD-14277 | 7% | 1% |
| cAcucuGAuAAAcucAAuGTsT | 968 | cAUUGAGUUuAUcAGAGUGTsT | 969 | AD-14278 | 12% | 1% |
| AAGAGcAGAuuAccucuGcTsT | 970 | GcAGAGGuAAUCUGCUCUUTsT | 971 | AD-14279 | 104% | 3% |
| ucuGcGAGcccAGAucAAcTsT | 972 | GUUGAUCUGGGCUCGcAGATsT | 973 | AD-14280 | 21% | 2% |
| AAcuuGAGccuuGuGuAuATsT | 974 | uAuAcAcAAGGCUcAAGUUTsT | 975 | AD-14281 | 43% | 3% |
| GAAuAuAuAuAucAGccGGTsT | 976 | CCGGCUGAuAuAuAuAUUCTsT | 977 | AD-14282 | 45% | 6% |
| uGucAucccuAuAGuucAcTsT | 978 | GUGAACuAuAGGGAUGAcATsT | 979 | AD-14283 | 35% | 5% |
| GAucuGGcAAccAuAuuucTsT | 980 | GAAAuAUGGUUGCcAGAUCTsT | 981 | AD-14284 | 58% | 3% |
| uGGcAAccAuAuuucuGGATsT | 982 | UCcAGAAAuAUGGUUGCcATsT | 983 | AD-14285 | 48% | 3% |
| GAuGuuuAccGAAGuGuuGTsT | 984 | cAAcACUUCGGuAAAcAUCTsT | 985 | AD-14286 | 49% | 3% |
| uuccuuAucGAGAAucuAATsT | 986 | UuAGAUUCUCGAuAAGGAATsT | 987 | AD-14287 | 6% | 1% |
| AGcuuAAuuGcuuucuGGATsT | 988 | UCcAGAAAGcAAUuAAGCUTsT | 989 | AD-14288 | 50% | 2% |
| uuGcuAuuAuGGGAGAccATsT | 990 | UGGUCUCCcAuAAuAGcAATsT | 991 | AD-14289 | 48% | 1% |
| GucAuGGcGucGcAGccAATsT | 992 | UUGGCUGCGACGCcAUGACTsT | 993 | AD-14290 | 112% | 7% |
| uAAuuGcAcuAucuuuGcGTsT | 994 | CGcAAAGAuAGUGcAAUuATsT | 995 | AD-14291 | 77% | 2% |
| cuAucuuuGcGuAuGGccATsT | 996 | UGGCcAuACGcAAAGAuAGTsT | 997 | AD-14292 | 80% | 6% |
| ucccuAuAGuucAcuuuGuTsT | 998 | AcAAAGUGAACuAuAGGGATsT | 999 | AD-14293 | 58% | 2% |
| ucAAccuuuAAuucAcuuGTsT | 1000 | cAAGUGAAUuAAAGGUUGATsT | 1001 | AD-14294 | 77% | 2% |
| GGcAAccAuAuuucuGGAATsT | 1002 | UUCcAGAAAuAUGGUUGCCTsT | 1003 | AD-14295 | 62% | 2% |
| AuGuAcucAAGAcuGAucuTsT | 1004 | AGAUcAGUCUUGAGuAcAUTsT | 1005 | AD-14296 | 59% | 4% |
| GcAGAccAuuuAAuuuGGcTsT | 1006 | GCcAAAUuAAAUGGUCUGCTsT | 1007 | AD-14297 | 37% | 1% |
| ucuGAGAGAcuAcAGAuGuTsT | 1008 | AcAUCUGuAGUCUCUcAGATsT | 1009 | AD-14298 | 21% | 1% |
| uGcucAuAGAGcAAAGAAcTsT | 1010 | GUUCUUUGCUCuAUGAGcATsT | 1011 | AD-14299 | 6% | 1% |
| AcAuAAGAccuuAuuuGGuTsT | 1012 | ACcAAAuAAGGUCUuAUGUTsT | 1013 | AD-14300 | 17% | 2% |
| uuuGuGcuGAuucuGAuGGTsT | 1014 | CcAUcAGAAUcAGcAcAAATsT | 1015 | AD-14301 | 97% | 6% |
| ccAucAAcAcuGGuAAGAATsT | 1016 | UUCUuACcAGUGUUGAUGGTsT | 1017 | AD-14302 | 13% | 1% |
| AGAcAAuuccGGAuGuGGATsT | 1018 | UCcAcAUCCGGAAUUGUCUTsT | 1019 | AD-14303 | 13% | 3% |
| GAAcuuGAGccuuGuGuAuTsT | 1020 | AuAcAcAAGGCUcAAGUUCTsT | 1021 | AD-14304 | 38% | 2% |
| uAAuuuGGcAGAGcGGAAATsT | 1022 | UUUCCGCUCUGCcAAAUuATsT | 1023 | AD-14305 | 14% | 2% |
| uGGAuGAAGuuAuuAuGGGTsT | 1024 | CCcAuAAuAACUUcAUCcATsT | 1025 | AD-14306 | 22% | 4% |
| AucuAcAuGAAcuAcAAGATsT | 1026 | UCUUGuAGUUcAUGuAGAUTsT | 1027 | AD-14307 | 26% | 6% |
| GGuAuuuuuGAucuGGcAATsT | 1028 | UUGCcAGAUcAAAAAuACCTsT | 1029 | AD-14308 | 62% | 8% |
| cuAAuGAAGAGuAuAccuGTsT | 1030 | cAGGuAuACUCUUcAUuAGTsT | 1031 | AD-14309 | 52% | 5% |
| uuuGAGAAAcuuAcuGAuATsT | 1032 | uAUcAGuAAGUUUCUcAAATsT | 1033 | AD-14310 | 32% | 3% |
| cGAuAAGAuAGAAGAucAATsT | 1034 | UUGAUCUUCuAUCUuAUCGTsT | 1035 | AD-14311 | 23% | 2% |
| cuGGcAAccAuAuuucuGGTsT | 1036 | CcAGAAAuAUGGUUGCcAGTsT | 1037 | AD-14312 | 49% | 6% |
| uAGAuAccAuuAcuAcAGuTsT | 1038 | ACUGuAGuAAUGGuAUCuATsT | 1039 | AD-14313 | 69% | 4% |
| GuAuuAAAuuGGGuuucAuTsT | 1040 | AUGAAACCcAAUUuAAuACTsT | 1041 | AD-14314 | 52% | 3% |
| AAGAccuuAuuuGGuAAucTsT | 1042 | GAUuACcAAAuAAGGUCUUTsT | 1043 | AD-14315 | 66% | 4% |
| GcuGuuGAuAAGAGAGcucTsT | 1044 | GAGCUCUCUuAUcAAcAGCTsT | 1045 | AD-14316 | 19% | 4% |
| uAcucAuGuuucucAGAuuTsT | 1046 | AAUCUGAGAAAcAUGAGuATsT | 1047 | AD-14317 | 16% | 5% |
| cAGAuGGAcGuAAGGcAGcTsT | 1048 | GCUGCCUuACGUCcAUCUGTsT | 1049 | AD-14318 | 52% | 11% |
| uAucccAAcAGGuAcGAcATsT | 1050 | UGUCGuACCUGUUGGGAuATsT | 1051 | AD-14319 | 28% | 11% |
| cAuuGcuAuuAuGGGAGAcTsT | 1052 | GUCUCCcAuAAuAGcAAUGTsT | 1053 | AD-14320 | 52% | 10% |
| cccucAGuAAAuccAuGGuTsT | 1054 | ACcAUGGAUUuACUGAGGGTsT | 1055 | AD-14321 | 53% | 6% |
| GGucAuuAcuGcccuuGuATsT | 1056 | uAcAAGGGcAGuAAUGACCTsT | 1057 | AD-14322 | 20% | 2% |
| AAccAcucAAAAAcAuuuGTsT | 1058 | cAAAUGUUUUUGAGUGGUUTsT | 1059 | AD-14323 | 116% | 6% |
| uuuGcAAGuuAAuGAAucuTsT | 1060 | AGAUUcAUuAACUUGcAAATsT | 1061 | AD-14324 | 14% | 2% |
| uuAuuuucAGuAGucAGAATsT | 1062 | UUCUGACuACUGAAAAuAATsT | 1063 | AD-14325 | 50% | 2% |
| uuuucucGAuucAAAucuuTsT | 1064 | AAGAUUuGAAUCGAGAAAATsT | 1065 | AD-14326 | 47% | 3% |
| GuAcGAAAAGAAGuuAGuGTsT | 1066 | cACuAACUUCUUUUCGuACTsT | 1067 | AD-14327 | 18% | 2% |
| uuuAAAAcGAGAucuuGcuTsT | 1068 | AGcAAGAUCUCGUUUuAAATsT | 1069 | AD-14328 | 19% | 1% |
| GAAuuGAuuAAuGuAcucATsT | 1070 | UGAGuAcAUuAAUcAAUUCTsT | 1071 | AD-14329 | 94% | 10% |
| GAuGGAcGuAAGGcAGcucTsT | 1072 | GAGCUGCCUuACGUCcAUCTsT | 1073 | AD-14330 | 60% | 4% |
| cAucuGAcuAAuGGcucuGTsT | 1074 | cAGAGCcAUuAGUcAGAUGTsT | 1075 | AD-14331 | 54% | 7% |
| GuGAuccuGuAcGAAAAGATsT | 1076 | UCUUUUCGuAcAGGAUcACTsT | 1077 | AD-14332 | 22% | 4% |
| AGcucuuAuuAAGGAGuAuTsT | 1078 | AuACUCCUuAAuAAGAGCUTsT | 1079 | AD-14333 | 70% | 10% |
| GcucuuAuuAAGGAGuAuATsT | 1080 | uAuACUCCUuAAuAAGAGCTsT | 1081 | AD-14334 | 18% | 3% |
| ucuuAuuAAGGAGuAuAcGTsT | 1082 | CGuAuACUCCUuAAuAAGATsT | 1083 | AD-14335 | 38% | 6% |
| uAuuAAGGAGuAuAcGGAGTsT | 1084 | CUCCGuAuACUCCUuAAuATsT | 1085 | AD-14336 | 16% | 3% |
| cuGcAGcccGuGAGAAAAATsT | 1086 | UUUUUCUcACGGGCUGcAGTsT | 1087 | AD-14337 | 65% | 4% |
| ucAAGAcuGAucuucuAAGTsT | 1088 | CUuAGAAGAUcAGUCUUGATsT | 1089 | AD-14338 | 18% | 0% |
| cuucuAAGuucAcuGGAAATsT | 1090 | UUUCcAGUGAACUuAGAAGTsT | 1091 | AD-14339 | 20% | 4% |
| uGcAAGuuAAuGAAucuuuTsT | 1092 | AAAGAUUcAUuAACUUGcATsT | 1093 | AD-14340 | 24% | 1% |
| AAucuAAGGAuAuAGucAATsT | 1094 | UUGACuAuAUCCUuAGAUUTsT | 1095 | AD-14341 | 27% | 3% |
| AucucuGAAcAcAAGAAcATsT | 1096 | UGUUCUUGUGUUcAGAGAUTsT | 1097 | AD-14342 | 13% | 1% |
| uucuGAAcAGuGGGuAucuTsT | 1098 | AGAuACCcACUGUUcAGAATsT | 1099 | AD-14343 | 19% | 1% |
| AGuuAuuuAuAcccAucAATsT | 1100 | UUGAUGGGuAuAAAuAACUTsT | 1101 | AD-14344 | 23% | 2% |
| AuGcuAAAcuGuucAGAAATsT | 1102 | UUUCUGAAcAGUUuAGcAUTsT | 1103 | AD-14345 | 21% | 4% |
| cuAcAGAGcAcuuGGuuAcTsT | 1104 | GuAACcAAGUGCUCUGuAGTsT | 1105 | AD-14346 | 18% | 2% |
| uAuAuAucAGccGGGcGcGTsT | 1106 | CGCGCCCGGCUGAuAuAuATsT | 1107 | AD-14347 | 67% | 2% |
| AuGuAAAuAcGuAuuucuATsT | 1108 | uAGAAAuACGuAUUuAcAUTsT | 1109 | AD-14348 | 39% | 3% |
| uuuuucucGAuucAAAucuTsT | 1110 | AGAUUuGAAUCGAGAAAAATsT | 1111 | AD-14349 | 83% | 6% |
| AAucuuAAcccuuAGGAcuTsT | 1112 | AGUCCuAAGGGUuAAGAUUTsT | 1113 | AD-14350 | 54% | 2% |
| ccuuAGGAcucuGGuAuuuTsT | 1114 | AAAuACcAGAGUCCuAAGGTsT | 1115 | AD-14351 | 57% | 8% |
| AAuAAAcuGcccucAGuAATsT | 1116 | UuACUGAGGGcAGUUuAUUTsT | 1117 | AD-14352 | 82% | 3% |
| GAuccuGuAcGAAAAGAAGTsT | 1118 | CUUCUUUUCGuAcAGGAUCTsT | 1119 | AD-14353 | 2% | 1% |
| AAuGuGAuccuGuAcGAAATsT | 1120 | UUUCGuAcAGGAUcAcAUUTsT | 1121 | AD-14354 | 18% | 11% |
| GuGAAAAcAuuGGccGuucTsT | 1122 | GAACGGCcAAUGUUUUcACTsT | 1123 | AD-14355 | 2% | 1% |
| cuuGAGGAAAcucuGAGuATsT | 1124 | uACUcAGAGUUUCCUcAAGTsT | 1125 | AD-14356 | 8% | 2% |
| cGuuuAAAAcGAGAucuuGTsT | 1126 | cAAGAUCUCGUUUuAAACGTsT | 1127 | AD-14357 | 6% | 3% |
| uuAAAAcGAGAucuuGcuGTsT | 1128 | cAGcAAGAUCUCGUUUuAATsT | 1129 | AD-14358 | 98% | 17% |
| AAAGAuGuAucuGGucuccTsT | 1130 | GGAGACcAGAuAcAUCUUUTsT | 1131 | AD-14359 | 10% | 1% |
| cAGAAAAuGuGucuAcucATsT | 1132 | UGAGuAGAcAcAUUUUCUGTsT | 1133 | AD-14360 | 6% | 4% |
| cAGGAAuuGAuuAAuGuAcTsT | 1134 | GuAcAUuAAUcAAUUCCUGTsT | 1135 | AD-14361 | 30% | 5% |
| AGucAAcuAAAGcAuAuuuTsT | 1136 | AAAuAUGCUUuAGUUGACUTsT | 1137 | AD-14362 | 28% | 2% |
| uGuGuAAcAAucuAcAuGATsT | 1138 | UcAUGuAGAUUGUuAcAcATsT | 1139 | AD-14363 | 60% | 6% |
| AuAccAuuuGuuccuuGGuTsT | 1140 | ACcAAGGAAcAAAUGGuAUTsT | 1141 | AD-14364 | 12% | 9% |
| GcAGAAAucuAAGGAuAuATsT | 1142 | uAuAUCCUuAGAUUUCUGCTsT | 1143 | AD-14365 | 5% | 2% |
| uGGcuucucAcAGGAAcucTsT | 1144 | GAGUUCCUGUGAGAAGCcATsT | 1145 | AD-14366 | 28% | 5% |
| GAGAuGuGAAucucuGAAcTsT | 1146 | GUUcAGAGAUUcAcAUCUCTsT | 1147 | AD-14367 | 42% | 4% |
| uGuAAGccAAuGuuGuGAGTsT | 1148 | CUcAcAAcAUUGGCUuAcATsT | 1149 | AD-14368 | 93% | 12% |
| AGccAAuGuuGuGAGGcuuTsT | 1150 | AAGCCUcAcAAcAUUGGCUTsT | 1151 | AD-14369 | 65% | 4% |
| uuGuGAGGcuucAAGuucATsT | 1152 | UGAACUUGAAGCCUcAcAATsT | 1153 | AD-14370 | 5% | 2% |
| AGGcAGcucAuGAGAAAcATsT | 1154 | UGUUUCUcAUGAGCUGCCUTsT | 1155 | AD-14371 | 54% | 5% |
| AuAAAuuGAuAGcAcAAAATsT | 1156 | UUUUGUGCuAUcAAUUuAUTsT | 1157 | AD-14372 | 4% | 1% |
| AcAAAAucuAGAAcuuAAuTsT | 1158 | AUuAAGUUCuAGAUUUUGUTsT | 1159 | AD-14373 | 5% | 1% |
| GAuAucccAAcAGGuAcGATsT | 1160 | UCGuACCUGUUGGGAuAUCTsT | 1161 | AD-14374 | 92% | 6% |
| AAGuuAuuuAuAcccAucATsT | 1162 | UGAUGGGuAuAAAuAACUUTsT | 1163 | AD-14375 | 76% | 4% |
| uGuAAAuAcGuAuuucuAGTsT | 1164 | CuAGAAAuACGuAUUuAcATsT | 1165 | AD-14376 | 70% | 5% |
| ucuAGuuuucAuAuAAAGuTsT | 1166 | ACUUuAuAUGAAAACuAGATsT | 1167 | AD-14377 | 48% | 4% |
| AuAAAGuAGuucuuuuAuATsT | 1168 | uAuAAAAGAACuACUUuAUTsT | 1169 | AD-14378 | 48% | 3% |
| ccAuuuGuAGAGcuAcAAATsT | 1170 | UUUGuAGCUCuAcAAAUGGTsT | 1171 | AD-14379 | 44% | 5% |
| uAuuuucAGuAGucAGAAuTsT | 1172 | AUUCUGACuACUGAAAAuATsT | 1173 | AD-14380 | 35% | 16% |
| AAAucuAAcccuAGuuGuATsT | 1174 | uAcAACuAGGGUuAGAUUUTsT | 1175 | AD-14381 | 44% | 5% |
| cuuuAGAGuAuAcAuuGcuTsT | 1176 | AGcAAUGuAuACUCuAAAGTsT | 1177 | AD-14382 | 28% | 1% |
| AucuGAcuAAuGGcucuGuTsT | 1178 | AcAGAGCcAUuAGUcAGAUTsT | 1179 | AD-14383 | 55% | 11% |
| cAcAAuGAuuuAAGGAcuGTsT | 1180 | cAGUCCUuAAAUcAUUGUGTsT | 1181 | AD-14384 | 48% | 9% |
| ucuuuuucucGAuucAAAuTsT | 1182 | AUUuGAAUCGAGAAAAAGATsT | 1183 | AD-14385 | 36% | 2% |
| cuuuuucucGAuucAAAucTsT | 1184 | GAUUuGAAUCGAGAAAAAGTsT | 1185 | AD-14386 | 41% | 7% |
| AuuuucuGcucAcGAuGAGTsT | 1186 | CUcAUCGUGAGcAGAAAAUTsT | 1187 | AD-14387 | 38% | 3% |
| uuucuGcucAcGAuGAGuuTsT | 1188 | AACUcAUCGUGAGcAGAAATsT | 1189 | AD-14388 | 50% | 4% |
| AGAGcuAcAAAAccuAuccTsT | 1190 | GGAuAGGUUUUGuAGCUCUTsT | 1191 | AD-14389 | 98% | 6% |
| GAGccAAAGGuAcAccAcuTsT | 1192 | AGUGGUGuACCUUUGGCUCTsT | 1193 | AD-14390 | 43% | 8% |
| GccAAAGGuAcAccAcuAcTsT | 1194 | GuAGUGGUGuACCUUUGGCTsT | 1195 | AD-14391 | 48% | 4% |
| GAAcuGuAcucuucucAGcTsT | 1196 | GCUGAGAAGAGuAcAGUUCTsT | 1197 | AD-14392 | 44% | 3% |
| AGGuAAAuAucAccAAcAuTsT | 1198 | AUGUUGGUGAuAUUuACCUTsT | 1199 | AD-14393 | 37% | 2% |
| AGcuAcAAAAccuAuccuuTsT | 1200 | AAGGAuAGGUUUUGuAGCUTsT | 1201 | AD-14394 | 114% | 7% |
| uGuGAAAGcAuuuAAuuccTsT | 1202 | GGAAUuAAAUGCUUUcAcATsT | 1203 | AD-14395 | 55% | 4% |
| GcccAcuuuAGAGuAuAcATsT | 1204 | UGuAuACUCuAAAGUGGGCTsT | 1205 | AD-14396 | 49% | 5% |
| uGuGccAcAcuccAAGAccTsT | 1206 | GGUCUUGGAGUGUGGcAcATsT | 1207 | AD-14397 | 71% | 6% |
| AAAcuAAAuuGAucucGuATsT | 1208 | uACGAGAUcAAUUuAGUUUTsT | 1209 | AD-14398 | 81% | 7% |
| uGAucucGuAGAAuuAucuTsT | 1210 | AGAuAAUUCuACGAGAUcATsT | 1211 | AD-14399 | 38% | 4% |
| GcGuGcAGucGGuccuccATsT | 1212 | UGGAGGACCGACUGcACGCTsT | 1213 | AD-14400 | 106% | 8% |
| AAAGuuuAGAGAcAucuGATsT | 1214 | UcAGAUGUCUCuAAACUUUTsT | 1215 | AD-14401 | 47% | 3% |
| cAGAAGGAAuAuGuAcAAATsT | 1216 | UUUGuAcAuAUUCCUUCUGTsT | 1217 | AD-14402 | 31% | 1% |
| cGcccGAGAGuAccAGGGATsT | 1218 | UCCCUGGuACUCUCGGGCGTsT | 1219 | AD-14403 | 105% | 4% |
| cGGAGGAGAuAGAAcGuuuTsT | 1220 | AAACGUUCuAUCUCCUCCGTsT | 1221 | AD-14404 | 3% | 1% |
| AGAuAGAAcGuuuAAAAcGTsT | 1222 | CGUUUuAAACGUUCuAUCUTsT | 1223 | AD-14405 | 15% | 1% |
| GGAAcAGGAAcuucAcAAcTsT | 1224 | GUuGuGAAGUUCCuGUUCCTsT | 1225 | AD-14406 | 44% | 5% |
| GuGAGccAAAGGuAcAccATsT | 1226 | UGGUGuACCUUUGGCUcACTsT | 1227 | AD-14407 | 41% | 4% |
| AuccucccuAGAcuucccuTsT | 1228 | AGGGAAGUCuAGGGAGGAUTsT | 1229 | AD-14408 | 104% | 3% |
| cAcAcuccAAGAccuGuGcTsT | 1230 | GcAcAGGUCUUGGAGUGUGTsT | 1231 | AD-14409 | 67% | 4% |
| AcAGAAGGAAuAuGuAcAATsT | 1232 | UUGuAcAuAUUCCUUCUGUTsT | 1233 | AD-14410 | 22% | 1% |
| uuAGAGAcAucuGAcuuuGTsT | 1234 | cAAAGUcAGAUGUCUCuAATsT | 1235 | AD-14411 | 29% | 3% |
| AAuuGAucucGuAGAAuuATsT | 1236 | uAAUUCuACGAGAUcAAUUTsT | 1237 | AD-14412 | 31% | 4% |

[0385] dsRNA Targeting the VEGF Gene

[0386] Four hundred target sequences were identified within exons 1-5 of the VEGF-A121 mRNA sequence. Reference transcript is: NM_{—}003376.

| (SEQ ID NO: 1539) | |
|---|---|
| 1 | augaacuuuc ugcugucuug ggugcauugg agccuugccu ugcugcucua ccuccaccau |
| 61 | gccaaguggu cccaggcugc acccauggca gaaggaggag ggcagaauca ucacgaagug |
| 121 | gugaaguuca uggaugucua ucagcgcagc uacugccauc caaucgagac ccugguggac |
| 181 | aucuuccagg aguacccuga ugagaucgag uacaucuuca agccauccug ugugccccug |
| 241 | augcgaugcg ggggcugcug caaugacgag ggccuggagu gugugcccac ugaggagucc |
| 301 | aacaucacca ugcagauuau gcggaucaaa ccucaccaag gccagcacau aggagagaug |
| 361 | agcuuccuac agcacaacaa augugaaugc agaccaaaga aagauagagc aagacaagaa |
| 421 | aaaugugaca agccgaggcg guga |

[0387] Table 4a includes the identified target sequences. Corresponding siRNAs targeting these sequences were subjected to a bioinformatics screen.

[0388] To ensure that the sequences were specific to VEGF sequence and not to sequences from any other genes, the target sequences were checked against the sequences in Genbank using the BLAST search engine provided by NCBI. The use of the BLAST algorithm is described in Altschul et al., J. Mol. Biol. 215:403, 1990; and Altschul and Gish, Meth. Enzymol. 266:460, 1996.

[0389] siRNAs were also prioritized for their ability to cross react with monkey, rat and human VEGF sequences.

[0390] Of these 400 potential target sequences 80 were selected for analysis by experimental screening in order to identify a small number of lead candidates. A total of 114 siRNA molecules were designed for these 80 target sequences 114 (Table 4b).

TABLE 4a
Target sequences in VEGF-121

| | position | TARGET SEQUENCE IN |
|---|---|---|
| SEQ ID | in VEGF- | VEGF121 mRNA |
| NO: | 121 ORF | 5′ to 3′ |
| 1540 | 1 | AUGAACUUUCUGCUGUCUUGGGU |
| 1541 | 2 | UGAACUUUCUGCUGUCUUGGGUG |
| 1542 | 3 | GAACUUUCUGCUGUCUUGGGUGC |
| 1543 | 4 | AACUUUCUGCUGUCUUGGGUGCA |
| 1544 | 5 | ACUUUCUGCUGUCUUGGGUGCAU |
| 1545 | 6 | CUUUCUGCUGUCUUGGGUGCAUU |
| 1546 | 7 | UUUCUGCUGUCUUGGGUGCAUUG |
| 1547 | 8 | UUCUGCUGUCUUGGGUGCAUUGG |
| 1548 | 9 | UCUGCUGUCUUGGGUGCAUUGGA |
| 1549 | 10 | CUGCUGUCUUGGGUGCAUUGGAG |
| 1550 | 11 | UGCUGUCUUGGGUGCAUUGGAGC |
| 1551 | 12 | GCUGUCUUGGGUGCAUUGGAGCC |
| 1552 | 13 | CUGUCUUGGGUGCAUUGGAGCCU |
| 1553 | 14 | UGUCUUGGGUGCAUUGGAGCCUU |
| 1554 | 15 | GUCUUGGGUGCAUUGGAGCCUUG |
| 1555 | 16 | UCUUGGGUGCAUUGGAGCCUUGC |
| 1556 | 17 | CUUGGGUGCAUUGGAGCCUUGCC |
| 1557 | 18 | UUGGGUGCAUUGGAGCCUUGCCU |
| 1558 | 19 | UGGGUGCAUUGGAGCCUUGCCUU |
| 1559 | 20 | GGGUGCAUUGGAGCCUUGCCUUG |
| 1560 | 21 | GGUGCAUUGGAGCCUUGCCUUGC |
| 1561 | 22 | GUGCAUUGGAGCCUUGCCUUGCU |
| 1562 | 23 | UGCAUUGGAGCCUUGCCUUGCUG |
| 1563 | 24 | GCAUUGGAGCCUUGCCUUGCUGC |
| 1564 | 25 | CAUUGGAGCCUUGCCUUGCUGCU |
| 1565 | 26 | AUUGGAGCCUUGCCUUGCUGCUC |
| 1566 | 27 | UUGGAGCCUUGCCUUGCUGCUCU |
| 1567 | 28 | UGGAGCCUUGCCUUGCUGCUCUA |
| 1568 | 29 | GGAGCCUUGCCUUGCUGCUCUAC |
| 1569 | 30 | GAGCCUUGCCUUGCUGCUCUACC |
| 1570 | 31 | AGCCUUGCCUUGCUGCUCUACCU |
| 1571 | 32 | GCCUUGCCUUGCUGCUCUACCUC |
| 1572 | 33 | CCUUGCCUUGCUGCUCUACCUCC |
| 1573 | 34 | CUUGCCUUGCUGCUCUACCUCCA |
| 1574 | 35 | UUGCCUUGCUGCUCUACCUCCAC |
| 1575 | 36 | UGCCUUGCUGCUCUACCUCCACC |
| 1576 | 37 | GCCUUGCUGCUCUACCUCCACCA |
| 1577 | 38 | CCUUGCUGCUCUACCUCCACCAU |
| 1578 | 39 | CUUGCUGCUCUACCUCCACCAUG |
| 1579 | 40 | UUGCUGCUCUACCUCCACCAUGC |
| 1580 | 41 | UGCUGCUCUACCUCCACCAUGCC |
| 1581 | 42 | GCUGCUCUACCUCCACCAUGCCA |
| 1582 | 43 | CUGCUCUACCUCCACCAUGCCAA |
| 1583 | 44 | UGCUCUACCUCCACCAUGCCAAG |
| 1584 | 45 | GCUCUACCUCCACCAUGCCAAGU |
| 1585 | 46 | CUCUACCUCCACCAUGCCAAGUG |
| 1586 | 47 | UCUACCUCCACCAUGCCAAGUGG |
| 1587 | 48 | CUACCUCCACCAUGCCAAGUGGU |
| 1588 | 49 | UACCUCCACCAUGCCAAGUGGUC |
| 1589 | 50 | ACCUCCACCAUGCCAAGUGGUCC |
| 1590 | 51 | CCUCCACCAUGCCAAGUGGUCCC |
| 1591 | 52 | CUCCACCAUGCCAAGUGGUCCCA |
| 1592 | 53 | UCCACCAUGCCAAGUGGUCCCAG |
| 1593 | 54 | CCACCAUGCCAAGUGGUCCCAGG |
| 1594 | 55 | CACCAUGCCAAGUGGUCCCAGGC |
| 1595 | 56 | ACCAUGCCAAGUGGUCCCAGGCU |
| 1596 | 57 | CCAUGCCAAGUGGUCCCAGGCUG |
| 1597 | 58 | CAUGCCAAGUGGUCCCAGGCUGC |
| 1598 | 59 | AUGCCAAGUGGUCCCAGGCUGCA |
| 1599 | 60 | UGCCAAGUGGUCCCAGGCUGCAC |
| 1600 | 61 | GCCAAGUGGUCCCAGGCUGCACC |
| 1601 | 62 | CCAAGUGGUCCCAGGCUGCACCC |
| 1602 | 63 | CAAGUGGUCCCAGGCUGCACCCA |
| 1603 | 64 | AAGUGGUCCCAGGCUGCACCCAU |
| 1604 | 65 | AGUGGUCCCAGGCUGCACCCAUG |
| 1605 | 66 | GUGGUCCCAGGCUGCACCCAUGG |
| 1606 | 67 | UGGUCCCAGGCUGCACCCAUGGC |
| 1607 | 68 | GGUCCCAGGCUGCACCCAUGGCA |
| 1608 | 69 | GUCCCAGGCUGCACCCAUGGCAG |
| 1609 | 70 | UCCCAGGCUGCACCCAUGGCAGA |
| 1610 | 71 | CCCAGGCUGCACCCAUGGCAGAA |
| 1611 | 72 | CCAGGCUGCACCCAUGGCAGAAG |
| 1612 | 73 | CAGGCUGCACCCAUGGCAGAAGG |
| 1613 | 74 | AGGCUGCACCCAUGGCAGAAGGA |
| 1614 | 75 | GGCUGCACCCAUGGCAGAAGGAG |
| 1615 | 76 | GCUGCACCCAUGGCAGAAGGAGG |
| 1616 | 77 | CUGCACCCAUGGCAGAAGGAGGA |
| 1617 | 78 | UGCACCCAUGGCAGAAGGAGGAG |
| 1618 | 79 | GCACCCAUGGCAGAAGGAGGAGG |
| 1619 | 80 | CACCCAUGGCAGAAGGAGGAGGG |
| 1620 | 81 | ACCCAUGGCAGAAGGAGGAGGGC |
| 1621 | 82 | CCCAUGGCAGAAGGAGGAGGGCA |
| 1622 | 83 | CCAUGGCAGAAGGAGGAGGGCAG |
| 1623 | 84 | CAUGGCAGAAGGAGGAGGGCAGA |
| 1624 | 85 | AUGGCAGAAGGAGGAGGGCAGAA |
| 1625 | 86 | UGGCAGAAGGAGGAGGGCAGAAU |
| 1626 | 87 | GGCAGAAGGAGGAGGGCAGAAUC |
| 1627 | 88 | GCAGAAGGAGGAGGGCAGAAUCA |
| 1628 | 89 | CAGAAGGAGGAGGGCAGAAUCAU |
| 1629 | 90 | AGAAGGAGGAGGGCAGAAUCAUC |
| 1630 | 91 | GAAGGAGGAGGGCAGAAUCAUCA |
| 1631 | 92 | AAGGAGGAGGGCAGAAUCAUCAC |
| 1632 | 93 | AGGAGGAGGGCAGAAUCAUCACG |
| 1633 | 94 | GGAGGAGGGCAGAAUCAUCACGA |
| 1634 | 95 | GAGGAGGGCAGAAUCAUCACGAA |
| 1635 | 96 | AGGAGGGCAGAAUCAUCACGAAG |
| 1636 | 97 | GGAGGGCAGAAUCAUCACGAAGU |
| 1637 | 98 | GAGGGCAGAAUCAUCACGAAGUG |
| 1638 | 99 | AGGGCAGAAUCAUCACGAAGUGG |
| 1639 | 100 | GGGCAGAAUCAUCACGAAGUGGU |
| 1640 | 101 | GGCAGAAUCAUCACGAAGUGGUG |
| 1641 | 102 | GCAGAAUCAUCACGAAGUGGUGA |
| 1642 | 103 | CAGAAUCAUCACGAAGUGGUGAA |
| 1643 | 104 | AGAAUCAUCACGAAGUGGUGAAG |
| 1644 | 105 | GAAUCAUCACGAAGUGGUGAAGU |
| 1645 | 106 | AAUCAUCACGAAGUGGUGAAGUU |
| 1646 | 107 | AUCAUCACGAAGUGGUGAAGUUC |
| 1647 | 108 | UCAUCACGAAGUGGUGAAGUUCA |
| 1648 | 109 | CAUCACGAAGUGGUGAAGUUCAU |
| 1649 | 110 | AUCACGAAGUGGUGAAGUUCAUG |
| 1650 | 111 | UCACGAAGUGGUGAAGUUCAUGG |
| 1651 | 112 | CACGAAGUGGUGAAGUUCAUGGA |
| 1652 | 113 | ACGAAGUGGUGAAGUUCAUGGAU |
| 1653 | 114 | CGAAGUGGUGAAGUUCAUGGAUG |
| 1654 | 115 | GAAGUGGUGAAGUUCAUGGAUGU |
| 1655 | 116 | AAGUGGUGAAGUUCAUGGAUGUC |
| 1656 | 117 | AGUGGUGAAGUUCAUGGAUGUCU |
| 1657 | 118 | GUGGUGAAGUUCAUGGAUGUCUA |
| 1658 | 119 | UGGUGAAGUUCAUGGAUGUCUAU |
| 1659 | 120 | GGUGAAGUUCAUGGAUGUCUAUC |
| 1660 | 121 | GUGAAGUUCAUGGAUGUCUAUCA |
| 1661 | 122 | UGAAGUUCAUGGAUGUCUAUCAG |
| 1662 | 123 | GAAGUUCAUGGAUGUCUAUCAGC |
| 1663 | 124 | AAGUUCAUGGAUGUCUAUCAGCG |
| 1664 | 125 | AGUUCAUGGAUGUCUAUCAGCGC |
| 1665 | 126 | GUUCAUGGAUGUCUAUCAGCGCA |
| 1666 | 127 | UUCAUGGAUGUCUAUCAGCGCAG |
| 1667 | 128 | UCAUGGAUGUCUAUCAGCGCAGC |
| 1668 | 129 | CAUGGAUGUCUAUCAGCGCAGCU |
| 1669 | 130 | AUGGAUGUCUAUCAGCGCAGCUA |
| 1670 | 131 | UGGAUGUCUAUCAGCGCAGCUAC |
| 1671 | 132 | GGAUGUCUAUCAGCGCAGCUACU |
| 1672 | 133 | GAUGUCUAUCAGCGCAGCUACUG |
| 1673 | 134 | AUGUCUAUCAGCGCAGCUACUGC |
| 1674 | 135 | UGUCUAUCAGCGCAGCUACUGCC |
| 1675 | 136 | GUCUAUCAGCGCAGCUACUGCCA |
| 1676 | 137 | UCUAUCAGCGCAGCUACUGCCAU |
| 1677 | 138 | CUAUCAGCGCAGCUACUGCCAUC |
| 1678 | 139 | UAUCAGCGCAGCUACUGCCAUCC |
| 1679 | 140 | AUCAGCGCAGCUACUGCCAUCCA |
| 1680 | 141 | UCAGCGCAGCUACUGCCAUCCAA |
| 1681 | 142 | CAGCGCAGCUACUGCCAUCCAAU |
| 1682 | 143 | AGCGCAGCUACUGCCAUCCAAUC |
| 1683 | 144 | GCGCAGCUACUGCCAUCCAAUCG |
| 1684 | 145 | CGCAGCUACUGCCAUCCAAUCGA |
| 1685 | 146 | GCAGCUACUGCCAUCCAAUCGAG |
| 1686 | 147 | CAGCUACUGCCAUCCAAUCGAGA |
| 1687 | 148 | AGCUACUGCCAUCCAAUCGAGAC |
| 1688 | 149 | GCUACUGCCAUCCAAUCGAGACC |
| 1689 | 150 | CUACUGCCAUCCAAUCGAGACCC |
| 1690 | 151 | UACUGCCAUCCAAUCGAGACCCU |
| 1691 | 152 | ACUGCCAUCCAAUCGAGACCCUG |
| 1692 | 153 | CUGCCAUCCAAUCGAGACCCUGG |
| 1693 | 154 | UGCCAUCCAAUCGAGACCCUGGU |
| 1694 | 155 | GCCAUCCAAUCGAGACCCUGGUG |
| 1695 | 156 | CCAUCCAAUCGAGACCCUGGUGG |
| 1696 | 157 | CAUCCAAUCGAGACCCUGGUGGA |
| 1697 | 158 | AUCCAAUCGAGACCCUGGUGGAC |
| 1698 | 159 | UCCAAUCGAGACCCUGGUGGACA |
| 1699 | 160 | CCAAUCGAGACCCUGGUGGACAU |
| 1700 | 161 | CAAUCGAGACCCUGGUGGACAUC |
| 1701 | 162 | AAUCGAGACCCUGGUGGACAUCU |
| 1702 | 163 | AUCGAGACCCUGGUGGACAUCUU |
| 1703 | 164 | UCGAGACCCUGGUGGACAUCUUC |
| 1704 | 165 | CGAGACCCUGGUGGACAUCUUCC |
| 1705 | 166 | GAGACCCUGGUGGACAUCUUCCA |
| 1706 | 167 | AGACCCUGGUGGACAUCUUCCAG |
| 1707 | 168 | GACCCUGGUGGACAUCUUCCAGG |
| 1708 | 169 | ACCCUGGUGGACAUCUUCCAGGA |
| 1709 | 170 | CCCUGGUGGACAUCUUCCAGGAG |
| 1710 | 171 | CCUGGUGGACAUCUUCCAGGAGU |
| 1711 | 172 | CUGGUGGACAUCUUCCAGGAGUA |
| 1712 | 173 | UGGUGGACAUCUUCCAGGAGUAC |
| 1713 | 174 | GGUGGACAUCUUCCAGGAGUACC |
| 1714 | 175 | GUGGACAUCUUCCAGGAGUACCC |
| 1715 | 176 | UGGACAUCUUCCAGGAGUACCCU |
| 1716 | 177 | GGACAUCUUCCAGGAGUACCCUG |
| 1717 | 178 | GACAUCUUCCAGGAGUACCCUGA |
| 1718 | 179 | ACAUCUUCCAGGAGUACCCUGAU |
| 1719 | 180 | CAUCUUCCAGGAGUACCCUGAUG |
| 1720 | 181 | AUCUUCCAGGAGUACCCUGAUGA |
| 1721 | 182 | UCUUCCAGGAGUACCCUGAUGAG |
| 1722 | 183 | CUUCCAGGAGUACCCUGAUGAGA |
| 1723 | 184 | UUCCAGGAGUACCCUGAUGAGAU |
| 1724 | 185 | UCCAGGAGUACCCUGAUGAGAUC |
| 1725 | 186 | CCAGGAGUACCCUGAUGAGAUCG |
| 1726 | 187 | CAGGAGUACCCUGAUGAGAUCGA |
| 1727 | 188 | AGGAGUACCCUGAUGAGAUCGAG |
| 1728 | 189 | GGAGUACCCUGAUGAGAUCGAGU |
| 1729 | 190 | GAGUACCCUGAUGAGAUCGAGUA |
| 1730 | 191 | AGUACCCUGAUGAGAUCGAGUAC |
| 1731 | 192 | GUACCCUGAUGAGAUCGAGUACA |
| 1732 | 193 | UACCCUGAUGAGAUCGAGUACAU |
| 1733 | 194 | ACCCUGAUGAGAUCGAGUACAUC |
| 1734 | 195 | CCCUGAUGAGAUCGAGUACAUCU |
| 1735 | 196 | CCUGAUGAGAUCGAGUACAUCUU |
| 1736 | 197 | CUGAUGAGAUCGAGUACAUCUUC |
| 1737 | 198 | UGAUGAGAUCGAGUACAUCUUCA |
| 1738 | 199 | GAUGAGAUCGAGUACAUCUUCAA |
| 1739 | 200 | AUGAGAUCGAGUACAUCUUCAAG |
| 1740 | 201 | UGAGAUCGAGUACAUCUUCAAGC |
| 1741 | 202 | GAGAUCGAGUACAUCUUCAAGCC |
| 1742 | 203 | AGAUCGAGUACAUCUUCAAGCCA |
| 1743 | 204 | GAUCGAGUACAUCUUCAAGCCAU |
| 1744 | 205 | AUCGAGUACAUCUUCAAGCCAUC |
| 1745 | 206 | UCGAGUACAUCUUCAAGCCAUCC |
| 1746 | 207 | CGAGUACAUCUUCAAGCCAUCCU |
| 1747 | 208 | GAGUACAUCUUCAAGCCAUCCUG |
| 1748 | 209 | AGUACAUCUUCAAGCCAUCCUGU |
| 1749 | 210 | GUACAUCUUCAAGCCAUCCUGUG |
| 1750 | 211 | UACAUCUUCAAGCCAUCCUGUGU |
| 1751 | 212 | ACAUCUUCAAGCCAUCCUGUGUG |
| 1752 | 213 | CAUCUUCAAGCCAUCCUGUGUGC |
| 1753 | 214 | AUCUUCAAGCCAUCCUGUGUGCC |
| 1754 | 215 | UCUUCAAGCCAUCCUGUGUGCCC |
| 1755 | 216 | CUUCAAGCCAUCCUGUGUGCCCC |
| 1756 | 217 | UUCAAGCCAUCCUGUGUGCCCCU |
| 1757 | 218 | UCAAGCCAUCCUGUGUGCCCCUG |
| 1758 | 219 | CAAGCCAUCCUGUGUGCCCCUGA |
| 1759 | 220 | AAGCCAUCCUGUGUGCCCCUGAU |
| 1760 | 221 | AGCCAUCCUGUGUGCCCCUGAUG |
| 1761 | 222 | GCCAUCCUGUGUGCCCCUGAUGC |
| 1762 | 223 | CCAUCCUGUGUGCCCCUGAUGCG |
| 1763 | 224 | CAUCCUGUGUGCCCCUGAUGCGA |
| 1764 | 225 | AUCCUGUGUGCCCCUGAUGCGAU |
| 1765 | 226 | UCCUGUGUGCCCCUGAUGCGAUG |
| 1766 | 227 | CCUGUGUGCCCCUGAUGCGAUGC |
| 1767 | 228 | CUGUGUGCCCCUGAUGCGAUGCG |
| 1768 | 229 | UGUGUGCCCCUGAUGCGAUGCGG |
| 1769 | 230 | GUGUGCCCCUGAUGCGAUGCGGG |
| 1770 | 231 | UGUGCCCCUGAUGCGAUGCGGGG |
| 1771 | 232 | GUGCCCCUGAUGCGAUGCGGGGG |
| 1772 | 233 | UGCCCCUGAUGCGAUGCGGGGGC |
| 1773 | 234 | GCCCCUGAUGCGAUGCGGGGGCU |
| 1774 | 235 | CCCCUGAUGCGAUGCGGGGGCUG |
| 1775 | 236 | CCCUGAUGCGAUGCGGGGGCUGC |
| 1776 | 237 | CCUGAUGCGAUGCGGGGGCUGCU |
| 1777 | 238 | CUGAUGCGAUGCGGGGGCUGCUG |
| 1778 | 239 | UGAUGCGAUGCGGGGGCUGCUGC |
| 1779 | 240 | GAUGCGAUGCGGGGGCUGCUGCA |
| 1780 | 241 | AUGCGAUGCGGGGGCUGCUGCAA |
| 1781 | 242 | UGCGAUGCGGGGGCUGCUGCAAU |
| 1782 | 243 | GCGAUGCGGGGGCUGCUGCAAUG |
| 1783 | 244 | CGAUGCGGGGGCUGCUGCAAUGA |
| 1784 | 245 | GAUGCGGGGGCUGCUGCAAUGAC |
| 1785 | 246 | AUGCGGGGGCUGCUGCAAUGACG |
| 1786 | 247 | UGCGGGGGCUGCUGCAAUGACGA |
| 1787 | 248 | GCGGGGGCUGCUGCAAUGACGAG |
| 1788 | 249 | CGGGGGCUGCUGCAAUGACGAGG |
| 1789 | 250 | GGGGGCUGCUGCAAUGACGAGGG |
| 1790 | 251 | GGGGCUGCUGCAAUGACGAGGGC |
| 1791 | 252 | GGGCUGCUGCAAUGACGAGGGCC |
| 1792 | 253 | GGCUGCUGCAAUGACGAGGGCCU |
| 1793 | 254 | GCUGCUGCAAUGACGAGGGCCUG |
| 1794 | 255 | CUGCUGCAAUGACGAGGGCCUGG |
| 1795 | 256 | UGCUGCAAUGACGAGGGCCUGGA |
| 1796 | 257 | GCUGCAAUGACGAGGGCCUGGAG |
| 1797 | 258 | CUGCAAUGACGAGGGCCUGGAGU |
| 1798 | 259 | UGCAAUGACGAGGGCCUGGAGUG |
| 1799 | 260 | GCAAUGACGAGGGCCUGGAGUGU |
| 1800 | 261 | CAAUGACGAGGGCCUGGAGUGUG |
| 1801 | 262 | AAUGACGAGGGCCUGGAGUGUGU |
| 1802 | 263 | AUGACGAGGGCCUGGAGUGUGUG |
| 1803 | 264 | UGACGAGGGCCUGGAGUGUGUGC |
| 1804 | 265 | GACGAGGGCCUGGAGUGUGUGCC |
| 1805 | 266 | ACGAGGGCCUGGAGUGUGUGCCC |
| 1806 | 267 | CGAGGGCCUGGAGUGUGUGCCCA |
| 1807 | 268 | GAGGGCCUGGAGUGUGUGCCCAC |
| 1808 | 269 | AGGGCCUGGAGUGUGUGCCCACU |
| 1809 | 270 | GGGCCUGGAGUGUGUGCCCACUG |
| 1810 | 271 | GGCCUGGAGUGUGUGCCCACUGA |
| 1811 | 272 | GCCUGGAGUGUGUGCCCACUGAG |
| 1812 | 273 | CCUGGAGUGUGUGCCCACUGAGG |
| 1813 | 274 | CUGGAGUGUGUGCCCACUGAGGA |
| 1814 | 275 | UGGAGUGUGUGCCCACUGAGGAG |
| 1815 | 276 | GGAGUGUGUGCCCACUGAGGAGU |
| 1816 | 277 | GAGUGUGUGCCCACUGAGGAGUC |
| 1817 | 278 | AGUGUGUGCCCACUGAGGAGUCC |
| 1818 | 279 | GUGUGUGCCCACUGAGGAGUCCA |
| 1819 | 280 | UGUGUGCCCACUGAGGAGUCCAA |
| 1820 | 281 | GUGUGCCCACUGAGGAGUCCAAC |
| 1821 | 282 | UGUGCCCACUGAGGAGUCCAACA |
| 1822 | 283 | GUGCCCACUGAGGAGUCCAACAU |
| 1823 | 284 | UGCCCACUGAGGAGUCCAACAUC |
| 1824 | 285 | GCCCACUGAGGAGUCCAACAUCA |
| 1825 | 286 | CCCACUGAGGAGUCCAACAUCAC |
| 1826 | 287 | CCACUGAGGAGUCCAACAUCACC |
| 1827 | 288 | CACUGAGGAGUCCAACAUCACCA |
| 1828 | 289 | ACUGAGGAGUCCAACAUCACCAU |
| 1829 | 290 | CUGAGGAGUCCAACAUCACCAUG |
| 1830 | 291 | UGAGGAGUCCAACAUCACCAUGC |
| 1831 | 292 | GAGGAGUCCAACAUCACCAUGCA |
| 1832 | 293 | AGGAGUCCAACAUCACCAUGCAG |
| 1833 | 294 | GGAGUCCAACAUCACCAUGCAGA |
| 1834 | 295 | GAGUCCAACAUCACCAUGCAGAU |
| 1835 | 296 | AGUCCAACAUCACCAUGCAGAUU |
| 1836 | 297 | GUCCAACAUCACCAUGCAGAUUA |
| 1837 | 298 | UCCAACAUCACCAUGCAGAUUAU |
| 1838 | 299 | CCAACAUCACCAUGCAGAUUAUG |
| 1839 | 300 | CAACAUCACCAUGCAGAUUAUGC |
| 1840 | 301 | AACAUCACCAUGCAGAUUAUGCG |
| 1841 | 302 | ACAUCACCAUGCAGAUUAUGCGG |
| 1842 | 303 | CAUCACCAUGCAGAUUAUGCGGA |
| 1843 | 304 | AUCACCAUGCAGAUUAUGCGGAU |
| 1844 | 305 | UCACCAUGCAGAUUAUGCGGAUC |
| 1845 | 306 | CACCAUGCAGAUUAUGCGGAUCA |
| 1846 | 307 | ACCAUGCAGAUUAUGCGGAUCAA |
| 1847 | 308 | CCAUGCAGAUUAUGCGGAUCAAA |
| 1848 | 309 | CAUGCAGAUUAUGCGGAUCAAAC |
| 1849 | 310 | AUGCAGAUUAUGCGGAUCAAACC |
| 1850 | 311 | UGCAGAUUAUGCGGAUCAAACCU |
| 1851 | 312 | GCAGAUUAUGCGGAUCAAACCUC |
| 1852 | 313 | CAGAUUAUGCGGAUCAAACCUCA |
| 1853 | 314 | AGAUUAUGCGGAUCAAACCUCAC |
| 1854 | 315 | GAUUAUGCGGAUCAAACCUCACC |
| 1855 | 316 | AUUAUGCGGAUCAAACCUCACCA |
| 1856 | 317 | UUAUGCGGAUCAAACCUCACCAA |
| 1857 | 318 | UAUGCGGAUCAAACCUCACCAAG |
| 1858 | 319 | AUGCGGAUCAAACCUCACCAAGG |
| 1859 | 320 | UGCGGAUCAAACCUCACCAAGGC |
| 1860 | 321 | GCGGAUCAAACCUCACCAAGGCC |
| 1861 | 322 | CGGAUCAAACCUCACCAAGGCCA |
| 1862 | 323 | GGAUCAAACCUCACCAAGGCCAG |
| 1863 | 324 | GAUCAAACCUCACCAAGGCCAGC |
| 1864 | 325 | AUCAAACCUCACCAAGGCCAGCA |
| 1865 | 326 | UCAAACCUCACCAAGGCCAGCAC |
| 1866 | 327 | CAAACCUCACCAAGGCCAGCACA |
| 1867 | 328 | AAACCUCACCAAGGCCAGCACAU |
| 1868 | 329 | AACCUCACCAAGGCCAGCACAUA |
| 1869 | 330 | ACCUCACCAAGGCCAGCACAUAG |
| 1870 | 331 | CCUCACCAAGGCCAGCACAUAGG |
| 1871 | 332 | CUCACCAAGGCCAGCACAUAGGA |
| 1872 | 333 | UCACCAAGGCCAGCACAUAGGAG |
| 1873 | 334 | CACCAAGGCCAGCACAUAGGAGA |
| 1874 | 335 | ACCAAGGCCAGCACAUAGGAGAG |
| 1875 | 336 | CCAAGGCCAGCACAUAGGAGAGA |
| 1876 | 337 | CAAGGCCAGCACAUAGGAGAGAU |
| 1877 | 338 | AAGGCCAGCACAUAGGAGAGAUG |
| 1878 | 339 | AGGCCAGCACAUAGGAGAGAUGA |
| 1879 | 340 | GGCCAGCACAUAGGAGAGAUGAG |
| 1880 | 341 | GCCAGCACAUAGGAGAGAUGAGC |
| 1881 | 342 | CCAGCACAUAGGAGAGAUGAGCU |
| 1882 | 343 | CAGCACAUAGGAGAGAUGAGCUU |
| 1883 | 344 | AGCACAUAGGAGAGAUGAGCUUC |
| 1884 | 345 | GCACAUAGGAGAGAUGAGCUUCC |
| 1885 | 346 | CACAUAGGAGAGAUGAGCUUCCU |
| 1886 | 347 | ACAUAGGAGAGAUGAGCUUCCUA |
| 1887 | 348 | CAUAGGAGAGAUGAGCUUCCUAC |
| 1888 | 349 | AUAGGAGAGAUGAGCUUCCUACA |
| 1889 | 350 | UAGGAGAGAUGAGCUUCCUACAG |
| 1890 | 351 | AGGAGAGAUGAGCUUCCUACAGC |
| 1891 | 352 | GGAGAGAUGAGCUUCCUACAGCA |
| 1892 | 353 | GAGAGAUGAGCUUCCUACAGCAC |
| 1893 | 354 | AGAGAUGAGCUUCCUACAGCACA |
| 1894 | 355 | GAGAUGAGCUUCCUACAGCACAA |
| 1895 | 356 | AGAUGAGCUUCCUACAGCACAAC |
| 1896 | 357 | GAUGAGCUUCCUACAGCACAACA |
| 1897 | 358 | AUGAGCUUCCUACAGCACAACAA |
| 1898 | 359 | UGAGCUUCCUACAGCACAACAAA |
| 1899 | 360 | GAGCUUCCUACAGCACAACAAAU |
| 1900 | 361 | AGCUUCCUACAGCACAACAAAUG |
| 1901 | 362 | GCUUCCUACAGCACAACAAAUGU |
| 1902 | 363 | CUUCCUACAGCACAACAAAUGUG |
| 1903 | 364 | UUCCUACAGCACAACAAAUGUGA |
| 1904 | 365 | UCCUACAGCACAACAAAUGUGAA |
| 1905 | 366 | CCUACAGCACAACAAAUGUGAAU |
| 1906 | 367 | CUACAGCACAACAAAUGUGAAUG |
| 1907 | 368 | UACAGCACAACAAAUGUGAAUGC |
| 1908 | 369 | ACAGCACAACAAAUGUGAAUGCA |
| 1909 | 370 | CAGCACAACAAAUGUGAAUGCAG |
| 1910 | 371 | AGCACAACAAAUGUGAAUGCAGA |
| 1911 | 372 | GCACAACAAAUGUGAAUGCAGAC |
| 1912 | 373 | CACAACAAAUGUGAAUGCAGACC |
| 1913 | 374 | ACAACAAAUGUGAAUGCAGACCA |
| 1914 | 375 | CAACAAAUGUGAAUGCAGACCAA |
| 1915 | 376 | AACAAAUGUGAAUGCAGACCAAA |
| 1916 | 377 | ACAAAUGUGAAUGCAGACCAAAG |
| 1917 | 378 | CAAAUGUGAAUGCAGACCAAAGA |
| 1918 | 379 | AAAUGUGAAUGCAGACCAAAGAA |
| 1919 | 380 | AAUGUGAAUGCAGACCAAAGAAA |
| 1920 | 381 | AUGUGAAUGCAGACCAAAGAAAG |
| 1921 | 382 | UGUGAAUGCAGACCAAAGAAAGA |
| 1922 | 383 | GUGAAUGCAGACCAAAGAAAGAU |
| 1923 | 384 | UGAAUGCAGACCAAAGAAAGAUA |
| 1924 | 385 | GAAUGCAGACCAAAGAAAGAUAG |
| 1925 | 386 | AAUGCAGACCAAAGAAAGAUAGA |
| 1926 | 387 | AUGCAGACCAAAGAAAGAUAGAG |
| 1927 | 388 | UGCAGACCAAAGAAAGAUAGAGC |
| 1928 | 389 | GCAGACCAAAGAAAGAUAGAGCA |
| 1929 | 390 | CAGACCAAAGAAAGAUAGAGCAA |
| 1930 | 391 | AGACCAAAGAAAGAUAGAGCAAG |
| 1931 | 392 | GACCAAAGAAAGAUAGAGCAAGA |
| 1932 | 393 | ACCAAAGAAAGAUAGAGCAAGAC |
| 1933 | 394 | CCAAAGAAAGAUAGAGCAAGACA |
| 1934 | 395 | CAAAGAAAGAUAGAGCAAGACAA |
| 1935 | 396 | AAAGAAAGAUAGAGCAAGACAAG |
| 1936 | 397 | AAGAAAGAUAGAGCAAGACAAGA |
| 1937 | 398 | AGAAAGAUAGAGCAAGACAAGAA |
| 1938 | 399 | GAAAGAUAGAGCAAGACAAGAAA |
| 1939 | 400 | AAAGAUAGAGCAAGACAAGAAAA |

TABLE 4b
VEGF targeted duplexes

| position | SEQ | | | | SEQ | |
|---|---|---|---|---|---|---|
| in | ID | Target sequence | | | ID | |
| ORF | NO: | (5′-3′) | Duplex ID | Strand | NO: | Strand Sequences |

| | | | | | | |
|---|---|---|---|---|---|---|
| 1 | 2184 | AUGAACUUUCUGCUGUCUUGGGU | AL-DP-4043 | S | 1940 | 5 GAACUUUCUGCUGUCUUGGGU 3 |
| | | | | AS | 1941 | 3 UACUUGAAAGACGACAGAACCCA 5 |
| 22 | 2185 | GUGCAUUGGAGCCUUGCCUUGCU | AL-DP-4077 | S | 1942 | 5 GCAUUGGAGCCUUGCCUUGCU 3 |
| | | | | AS | 1943 | 3 CACGUAACCUCGGAACGGAACGA 5 |
| 47 | 2186 | UCUACCUCCACCAUGCCAAGUGG | AL-DP-4021 | S | 1944 | 5 UACCUCCACCAUGCCAAGUTT 3 |
| | | | | AS | 1945 | 3 TTAUGGAGGUGGUACGGUUCA 5 |
| 48 | 2187 | CUACCUCCACCAUGCCAAGUGGU | AL-DP-4109 | S | 1946 | 5 ACCUCCACCAUGCCAAGUGTT 3 |
| | | | | AS | 1947 | 3 TTUGGAGGUGGUACGGUUCAC 5 |
| 50 | 2188 | ACCUCCACCAUGCCAAGUGGUCC | AL-DP-4006 | S | 1948 | 5 CUCCACCAUGCCAAGUGGUCC 3 |
| | | | | AS | 1949 | 3 UGGAGGUGGUACGGUUCACCAGG 5 |
| | | | AL-DP-4083 | S | 1950 | 5 CUCCACCAUGCCAAGUGGUTT 3 |
| | | | | AS | 1951 | 3 TTGAGGUGGUACGGUUCACCA 5 |
| 51 | 2189 | CCUCCACCAUGCCAAGUGGUCCC | AL-DP-4047 | S | 1952 | 5 UCCACCAUGCCAAGUGGUCCC 3 |
| | | | | AS | 1953 | 3 GGAGGUGGUACGGUUCACCAGGG 5 |
| | | | AL-DP-4017 | S | 1954 | 5 UCCACCAUGCCAAGUGGUCTT 3 |
| | | | | AS | 1955 | 3 TTAGGUGGUACGGUUCACCAG 5 |
| 52 | 2190 | CUCCACCAUGCCAAGUGGUCCCA | AL-DP-4048 | S | 1956 | 5 CCACCAUGCCAAGUGGUCCCA 3 |
| | | | | AS | 1957 | 3 GAGGUGGUACGGUUCACCAGGGU 5 |
| | | | AL-DP-4103 | S | 1958 | 5 CCACCAUGCCAAGUGGUCCTT 3 |
| | | | | AS | 1959 | 3 TTGGUGGUACGGUUCACCAGG 5 |
| 53 | 2191 | UCCACCAUGCCAAGUGGUCCCAG | AL-DP-4035 | S | 1960 | 5 CACCAUGCCAAGUGGUCCCAG 3 |
| | | | | AS | 1961 | 3 AGGUGGUACGGUUCACCAGGGUC 5 |
| | | | AL-DP-4018 | S | 1962 | 5 CACCAUGCCAAGUGGUCCCTT 3 |
| | | | | AS | 1963 | 3 TTGUGGUACGGUUCACCAGGG 5 |
| 54 | 2192 | CCACCAUGCCAAGUGGUCCCAGG | AL-DP-4036 | S | 1964 | 5 ACCAUGCCAAGUGGUCCCAGG 3 |
| | | | | AS | 1965 | 3 GGUGGUACGGUUCACCAGGGUCC 5 |
| | | | AL-DP-4084 | S | 1966 | 5 ACCAUGCCAAGUGGUCCCATT 3 |
| | | | | AS | 1967 | 3 TTUGGUACGGUUCACCAGGGU 5 |
| 55 | 2193 | CACCAUGCCAAGUGGUCCCAGGC | AL-DP-4093 | S | 1968 | 5 CCAUGCCAAGUGGUCCCAGGC 3 |
| | | | | AS | 1969 | 3 GUGGUACGGUUCACCAGGGUCCG 5 |
| | | | AL-DP-4085 | S | 1970 | 5 CCAUGCCAAGUGGUCCCAGTT 3 |
| | | | | AS | 1971 | 3 TTGGUACGGUUCACCAGGGUC 5 |
| 56 | 2194 | ACCAUGCCAAGUGGUCCCAGGCU | AL-DP-4037 | S | 1972 | 5 CAUGCCAAGUGGUCCCAGGCU 3 |
| | | | | AS | 1973 | 3 UGGUACGGUUCACCAGGGUCCGA 5 |
| | | | AL-DP-4054 | S | 1974 | 5 CAUGCCAAGUGGUCCCAGGTT 3 |
| | | | | AS | 1975 | 3 TTGUACGGUUCACCAGGGUCC 5 |
| 57 | 2195 | CCAUGCCAAGUGGUCCCAGGCUG | AL-DP-4038 | S | 1976 | 5 AUGCCAAGUGGUCCCAGGCUG 3 |
| | | | | AS | 1977 | 3 GGUACGGUUCACCAGGGUCCGAC 5 |
| | | | AL-DP-4086 | S | 1978 | 5 AUGCCAAGUGGUCCCAGGCTT 3 |
| | | | | AS | 1979 | 3 TTUACGGUUCACCAGGGUCCG 5 |
| 58 | 2196 | CAUGCCAAGUGGUCCCAGGCUGC | AL-DP-4049 | S | 1980 | 5 UGCCAAGUGGUCCCAGGCUGC 3 |
| | | | | AS | 1981 | 3 GUACGGUUCACCAGGGUCCGACG 5 |
| | | | AL-DP-4087 | S | 1982 | 5 UGCCAAGUGGUCCCAGGCUTT 3 |
| | | | | AS | 1983 | 3 TTACGGUUCACCAGGGUCCGA 5 |
| 59 | 2197 | AUGCCAAGUGGUCCCAGGCUGCA | AL-DP-4001 | S | 1984 | 5 GCCAAGUGGUCCCAGGCUGCA 3 |
| | | | | AS | 1985 | 3 UACGGUUCACCAGGGUCCGACGU 5 |
| | | | AL-DP-4052 | A | 1986 | 5 GCCAAGUGGUCCCAGGCUGTT 3 |
| | | | | AS | 1987 | 3 TTCGGUUCACCAGGGUCCGAC 5 |
| 60 | 2198 | UGCCAAGUGGUCCCAGGCUGCAC | AL-DP-4007 | S | 1988 | 5 CCAAGUGGUCCCAGGCUGCAC 3 |
| | | | | AS | 1989 | 3 ACGGUUCACCAGGGUCCGACGUG 5 |
| | | | AL-DP-4088 | S | 1990 | 5 CCAAGUGGUCCCAGGCUGCTT 3 |
| | | | | AS | 1991 | 3 TTGGUUCACCAGGGUCCGACG 5 |
| 61 | 2199 | GCCAAGUGGUCCCAGGCUGCACC | AL-DP-4070 | S | 1992 | 5 CAAGUGGUCCCAGGCUGCACC 3 |
| | | | | AS | 1993 | 3 CGGUUCACCAGGGUCCGACGUGG 5 |
| | | | AL-DP-4055 | S | 1994 | 5 CAAGUGGUCCCAGGCUGCATT 3 |
| | | | | AS | 1995 | 3 TTGUUCACCAGGGUCCGACGU 5 |
| 62 | 2200 | CCAAGUGGUCCCAGGCUGCACCC | AL-DP-4071 | S | 1996 | 5 AAGUGGUCCCAGGCUGCACCC 3 |
| | | | | AS | 1997 | 3 GGUUCACCAGGGUCCGACGUGGG 5 |
| | | | AL-DP-4056 | S | 1998 | 5 AAGUGGUCCCAGGCUGCACTT 3 |
| | | | | AS | 1999 | 3 TTUUCACCAGGGUCCGACGUG 5 |
| 63 | 2201 | CAAGUGGUCCCAGGCUGCACCCA | AL-DP-4072 | S | 2000 | 5 AGUGGUCCCAGGCUGCACCCA 3 |
| | | | | AS | 2001 | 3 GUUCACCAGGGUCCGACGUGGGU 5 |
| | | | AL-DP-4057 | S | 2002 | 5 AGUGGUCCCAGGCUGCACCTT 3 |
| | | | | AS | 2003 | 3 TTUCACCAGGGUCCGACGUGG 5 |
| 64 | 2202 | AAGUGGUCCCAGGCUGCACCCAU | AL-DP-4066 | S | 2004 | 5 GUGGUCCCAGGCUGCACCCTT 3 |
| | | | | AS | 2005 | 3 TTCACCAGGGUCCGACGUGGG 5 |
| 99 | 2203 | AGGGCAGAAUCAUCACGAAGUGG | AL-DP-4022 | S | 2006 | 5 GGCAGAAUCAUCACGAAGUTT 3 |
| | | | | AS | 2007 | 3 TTCCGUCUUAGUAGUGCUUCA 5 |
| 100 | 2204 | GGGCAGAAUCAUCACGAAGUGGU | AL-DP-4023 | S | 2008 | 5 GCAGAAUCAUCACGAAGUGTT 3 |
| | | | | AS | 2009 | 3 TTCGUCUUAGUAGUGCUUCAC 5 |
| 101 | 2205 | GGCAGAAUCAUCACGAAGUGGUG | AL-DP-4024 | S | 2010 | 5 CAGAAUCAUCACGAAGUGGTT 3 |
| | | | | AS | 2011 | 3 TTGUCUUAGUAGUGCUUCACC 5 |
| 102 | 2206 | GCAGAAUCAUCACGAAGUGGUGA | AL-DP-4076 | S | 2012 | 5 AGAAUCAUCACGAAGUGGUGA 3 |
| | | | | AS | 2013 | 3 CGUCUUAGUAGUGCUUCACCACU 5 |
| | | | AL-DP-4019 | S | 2014 | 5 AGAAUCAUCACGAAGUGGUTT 3 |
| | | | | AS | 2015 | 3 TTUCUUAGUAGUGCUUCACCA 5 |
| 103 | 2207 | CAGAAUCAUCACGAAGUGGUGAA | AL-DP-4025 | S | 2016 | 5 GAAUCAUCACGAAGUGGUGTT 3 |
| | | | | AS | 2017 | 3 TTCUUAGUAGUGCUUCACCAC 5 |
| 104 | 2208 | AGAAUCAUCACGAAGUGGUGAAG | AL-DP-4110 | S | 2018 | 5 AAUCAUCACGAAGUGGUGATT 3 |
| | | | | AS | 2019 | 3 TTUUAGUAGUGCUUCACCACU 5 |
| 105 | 2209 | GAAUCAUCACGAAGUGGUGAAGU | AL-DP-4068 | S | 2020 | 5 AUCAUCACGAAGUGGUGAATT 3 |
| | | | | AS | 2021 | 3 TTUAGUAGUGCUUCACCACUU 5 |
| 113 | 2210 | ACGAAGUGGUGAAGUUCAUGGAU | AL-DP-4078 | S | 2022 | 5 GAAGUGGUGAAGUUCAUGGAU 3 |
| | | | | AS | 2023 | 3 UGCUUCACCACUUCAAGUACCUA 5 |
| 121 | 2211 | GUGAAGUUCAUGGAUGUCUAUCA | AL-DP-4080 | S | 2024 | 5 GAAGUUCAUGGAUGUCUAUCA 3 |
| | | | | AS | 2025 | 3 CACUUCAAGUACCUACAGAUAGU 5 |
| 129 | 2212 | CAUGGAUGUCUAUCAGCGCAGCU | AL-DP-4111 | S | 2026 | 5 UGGAUGUCUAUCAGCGCAGTT 3 |
| | | | | AS | 2027 | 3 TTACCUACAGAUAGUCGCGUC 5 |
| 130 | 2213 | AUGGAUGUCUAUCAGCGCAGCUA | AL-DP-4041 | S | 2028 | 5 GGAUGUCUAUCAGCGCAGCUA 3 |
| | | | | AS | 2029 | 3 UACCUACAGAUAGUCGCGUCGAU 5 |
| | | | AL-DP-4062 | S | 2030 | 5 GGAUGUCUAUCAGCGCAGCTT 3 |
| | | | | AS | 2031 | 3 TTCCUACAGAUAGUCGCGUCG 5 |
| 131 | 2214 | UGGAUGUCUAUCAGCGCAGCUAC | AL-DP-4069 | S | 2032 | 5 GAUGUCUAUCAGCGCAGCUTT 3 |
| | | | | AS | 2033 | 3 TTCUACAGAUAGUCGCGUCGA 5 |
| 132 | 2215 | GGAUGUCUAUCAGCGCAGCUACU | AL-DP-4112 | S | 2034 | 5 AUGUCUAUCAGCGCAGCUATT 3 |
| | | | | AS | 2035 | 3 TTUACAGAUAGUCGCGUCGAU 5 |
| 133 | 2216 | GAUGUCUAUCAGCGCAGCUACUG | AL-DP-4026 | S | 2036 | 5 UGUCUAUCAGCGCAGCUACTT 3 |
| | | | | AS | 2037 | 3 TTACAGAUAGUCGCGUCGAUG 5 |
| 134 | 2217 | AUGUCUAUCAGCGCAGCUACUGC | AL-DP-4095 | S | 2038 | 5 GUCUAUCAGCGCAGCUACUGC 3 |
| | | | | AS | 2039 | 3 UACAGAUAGUCGCGUCGAUGACG 5 |
| | | | AL-DP-4020 | S | 2040 | 5 GUCUAUCAGCGCAGCUACUTT 3 |
| | | | | AS | 2041 | 3 TTCAGAUAGUCGCGUCGAUGA 5 |
| 135 | 2218 | UGUCUAUCAGCGCAGCUACUGCC | AL-DP-4027 | S | 2042 | 5 UCUAUCAGCGCAGCUACUGTT 3 |
| | | | | AS | 2043 | 3 TTAGAUAGUCGCGUCGAUGAC 5 |
| 144 | 2219 | GCGCAGCUACUGCCAUCCAAUCG | AL-DP-4081 | S | 2044 | 5 GCAGCUACUGCCAUCCAAUCG 3 |
| | | | | AS | 2045 | 3 CGCGUCGAUGACGGUAGGUUAGC 5 |
| 146 | 2220 | GCAGCUACUGCCAUCCAAUCGAG | AL-DP-4098 | S | 2046 | 5 AGCUACUGCCAUCCAAUCGAG 3 |
| | | | | AS | 2047 | 3 CGUCGAUGACGGUAGGUUAGCUC 5 |
| 149 | 2221 | GCUACUGCCAUCCAAUCGAGACC | AL-DP-4028 | S | 2048 | 5 UACUGCCAUCCAAUCGAGATT 3 |
| | | | | AS | 2049 | 3 TTAUGACGGUAGGUUAGCUCU 5 |
| 150 | 2222 | CUACUGCCAUCCAAUCGAGACCC | AL-DP-4029 | S | 2050 | 5 ACUGCCAUCCAAUCGAGACTT 3 |
| | | | | AS | 2051 | 3 TTUGACGGUAGGUUAGCUCUG 5 |
| 151 | 2223 | UACUGCCAUCCAAUCGAGACCCU | AL-DP-4030 | S | 2052 | 5 CUGCCAUCCAAUCGAGACCTT 3 |
| | | | | AS | 2053 | 3 TTGACGGUAGGUUAGCUCUGG 5 |
| 152 | 2224 | ACUGCCAUCCAAUCGAGACCCUG | AL-DP-4031 | S | 2054 | 5 UGCCAUCCAAUCGAGACCCTT 3 |
| | | | | AS | 2055 | 3 TTACGGUAGGUUAGCUCUGGG 5 |
| 166 | 2225 | GAGACCCUGGUGGACAUCUUCCA | AL-DP-4008 | S | 2056 | 5 GACCCUGGUGGACAUCUUCCA 3 |
| | | | | AS | 2057 | 3 CUCUGGGACCACCUGUAGAAGGU 5 |
| | | | AL-DP-4058 | S | 2058 | 5 GACCCUGGUGGACAUCUUCTT 3 |
| | | | | AS | 2059 | 3 TTCUGGGACCACCUGUAGAAG 5 |
| 167 | 2226 | AGACCCUGGUGGACAUCUUCCAG | AL-DP-4009 | S | 2060 | 5 ACCCUGGUGGACAUCUUCCAG 3 |
| | | | | AS | 2061 | 3 UCUGGGACCACCUGUAGAAGGUC 5 |
| | | | AL-DP-4059 | S | 2062 | 5 ACCCUGGUGGACAUCUUCCTT 3 |
| | | | | AS | 2063 | 3 TTUGGGACCACCUGUAGAAGG 5 |
| 168 | 2227 | GACCCUGGUGGACAUCUUCCAGG | AL-DP-4010 | S | 2064 | 5 CCCUGGUGGACAUCUUCCAGG 3 |
| | | | | AS | 2065 | 3 CUGGGACCACCUGUAGAAGGUCC 5 |
| | | | AL-DP-4060 | S | 2066 | 5 CCCUGGUGGACAUCUUCCATT 3 |
| | | | | AS | 2067 | 3 TTGGGACCACCUGUAGAAGGU 5 |
| 169 | 2228 | ACCCUGGUGGACAUCUUCCAGGA | AL-DP-4073 | S | 2068 | 5 CCUGGUGGACAUCUUCCAGGA 3 |
| | | | | AS | 2069 | 3 UGGGACCACCUGUAGAAGGUCCU 5 |
| | | | AL-DP-4104 | S | 2070 | 5 CCUGGUGGACAUCUUCCAGTT 3 |
| | | | | AS | 2071 | 3 TTGGACCACCUGUAGAAGGUC 5 |
| 170 | 2229 | CCCUGGUGGACAUCUUCCAGGAG | AL-DP-4011 | S | 2072 | 5 CUGGUGGACAUCUUCCAGGAG 3 |
| | | | | AS | 2073 | 3 GGGACCACCUGUAGAAGGUCCUC 5 |
| | | | AL-DP-4089 | S | 2074 | 5 CUGGUGGACAUCUUCCAGGTT 3 |
| | | | | AS | 2075 | 3 TTGACCACCUGUAGAAGGUCC 5 |
| 171 | 2230 | CCUGGUGGACAUCUUCCAGGAGU | AL-DP-4074 | S | 2076 | 5 UGGUGGACAUCUUCCAGGAGU 3 |
| | | | | AS | 2077 | 3 GGACCACCUGUAGAAGGUCCUCA 5 |
| | | | AL-DP-4090 | S | 2078 | 5 UGGUGGACAUCUUCCAGGATT 3 |
| | | | | AS | 2079 | 3 TTACCACCUGUAGAAGGUCCU 5 |
| 172 | 2231 | CUGGUGGACAUCUUCCAGGAGUA | AL-DP-4039 | S | 2080 | 5 GGUGGACAUCUUCCAGGAGUA 3 |
| | | | | AS | 2081 | 3 GACCACCUGUAGAAGGUCCUCAU 5 |
| | | | AL-DP-4091 | S | 2082 | 5 GGUGGACAUCUUCCAGGAGTT 3 |
| | | | | AS | 2083 | 3 TTCCACCUGUAGAAGGUCCUC 5 |
| 175 | 2232 | GUGGACAUCUUCCAGGAGUACCC | AL-DP-4003 | S | 2084 | 5 GGACAUCUUCCAGGAGUACCC 3 |
| | | | | AS | 2085 | 3 CCUGUAGAAGGUCCUCAUGGG 5 |
| | | | AL-DP-4116 | S | 2086 | 5 GGACAUCUUCCAGGAGUACCC 3 |
| | | | | AS | 2087 | 3 CCUGUAGAAGGUCCUCAUGGG 5 |
| | | | AL-DP-4015 | S | 2088 | 5 GGACAUCUUCCAGGAGUACTT 3 |
| | | | | AS | 2089 | 3 TTCCUGUAGAAGGUCCUCAUG 5 |
| | | | AL-DP-4120 | S | 2090 | 5 GGACAUCUUCCAGGAGUAC 3 |
| | | | | AS | 2091 | 3 CCUGUAGAAGGUCCUCAUG 5 |
| 179 | 2233 | ACAUCUUCCAGGAGUACCCUGAU | AL-DP-4099 | S | 2092 | 5 AUCUUCCAGGAGUACCCUGAU 3 |
| | | | | AS | 2093 | 3 UGUAGAAGGUCCUCAUGGGACUA 5 |
| 191 | 2234 | AGUACCCUGAUGAGAUCGAGUAC | AL-DP-4032 | S | 2094 | 5 UACCCUGAUGAGAUCGAGUTT 3 |
| | | | | AS | 2095 | 3 TTAUGGGACUACUCUAGCUCA 5 |
| 192 | 2235 | GUACCCUGAUGAGAUCGAGUACA | AL-DP-4042 | S | 2096 | 5 ACCCUGAUGAGAUCGAGUACA 3 |
| | | | | AS | 2097 | 3 CAUGGGACUACUCUAGCUCAUGU 5 |
| | | | AL-DP-4063 | S | 2098 | 5 ACCCUGAUGAGAUCGAGUATT 3 |
| | | | | AS | 2099 | 3 TTUGGGACUACUCUAGCUCAU 5 |
| 209 | 2236 | AGUACAUCUUCAAGCCAUCCUGU | AL-DP-4064 | S | 2100 | 5 UACAUCUUCAAGCCAUCCUTT 3 |
| | | | | AS | 2101 | 3 TTAUGUAGAAGUUCGGUAGGA 5 |
| 260 | 2237 | GCAAUGACGAGGGCCUGGAGUGU | AL-DP-4044 | S | 2102 | 5 AAUGACGAGGGCCUGGAGUGU 3 |
| | | | | AS | 2103 | 3 CGUUACUGCUCCCGGACCUCACA 5 |
| 263 | 2238 | AUGACGAGGGCCUGGAGUGUGUG | AL-DP-4045 | S | 2104 | 5 GACGAGGGCCUGGAGUGUGUG 3 |
| | | | | AS | 2105 | 3 UACUGCUCCCGGACCUCACACAC 5 |
| 279 | 2239 | GUGUGUGCCCACUGAGGAGUCCA | AL-DP-4046 | S | 2106 | 5 GUGUGCCCACUGAGGAGUCCA 3 |
| | | | | AS | 2107 | 3 CACACACGGGUGACUCCUCAGGU 5 |
| 281 | 2240 | GUGUGCCCACUGAGGAGUCCAAC | AL-DP-4096 | S | 2108 | 5 GUGCCCACUGAGGAGUCCAAC 3 |
| | | | | AS | 2109 | 3 CACACGGGUGACUCCUCAGGUUG 5 |
| 283 | 2241 | GUGCCCACUGAGGAGUCCAACAU | AL-DP-4040 | S | 2110 | 5 GCCCACUGAGGAGUCCAACAU 3 |
| | | | | AS | 2111 | 3 CACGGGUGACUCCUCAGGUUGUA 5 |
| 289 | 2242 | ACUGAGGAGUCCAACAUCACCAU | AL-DP-4065 | S | 2112 | 5 UGAGGAGUCCAACAUCACCTT 3 |
| | | | | AS | 2113 | 3 TTACUCCUCAGGUUGUAGUGG 5 |
| 302 | 2243 | ACAUCACCAUGCAGAUUAUGCGG | AL-DP-4100 | S | 2114 | 5 AUCACCAUGCAGAUUAUGCGG 3 |
| | | | | AS | 2115 | 3 UGUAGUGGUACGUCUAAUACGCC 5 |
| 305 | 2244 | UCACCAUGCAGAUUAUGCGGAUC | AL-DP-4033 | S | 2116 | 5 ACCAUGCAGAUUAUGCGGATT 3 |
| | | | | AS | 2117 | 3 TTUGGUACGUCUAAUACGCCU 5 |
| 310 | 2245 | AUGCAGAUUAUGCGGAUCAAACC | AL-DP-4101 | S | 2118 | 5 GCAGAUUAUGCGGAUCAAACC 3 |
| | | | | AS | 2119 | 3 UACGUCUAAUACGCCUAGUUUGG 5 |
| 312 | 2246 | GCAGAUUAUGCGGAUCAAACCUC | AL-DP-4102 | S | 2120 | 5 AGAUUAUGCGGAUCAAACCUC 3 |
| | | | | AS | 2121 | 3 CGUCUAAUACGCCUAGUUUGGAG 5 |
| 315 | 2247 | GAUUAUGCGGAUCAAACCUCACC | AL-DP-4034 | S | 2122 | 5 UUAUGCGGAUCAAACCUCATT 3 |
| | | | | AS | 2123 | 3 TTAAUACGCCUAGUUUGGAGU 5 |
| 316 | 2248 | AUUAUGCGGAUCAAACCUCACCA | AL-DP-4113 | S | 2124 | 5 UAUGCGGAUCAAACCUCACTT 3 |
| | | | | AS | 2125 | 3 TTAUACGCCUAGUUUGGAGUG 5 |
| 317 | 2249 | UUAUGCGGAUCAAACCUCACCAA | AL-DP-4114 | S | 2126 | 5 AUGCGGAUCAAACCUCACCTT 3 |
| | | | | AS | 2127 | 3 TTUACGCCUAGUUUGGAGUGG 5 |
| 319 | 2250 | AUGCGGAUCAAACCUCACCAAGG | AL-DP-4002 | S | 2128 | 5 GCGGAUCAAACCUCACCAAGG 3 |
| | | | | AS | 2129 | 3 UACGCCUAGUUUGGAGUGGUUCC 5 |
| | | | AL-DP-4115 | S | 2130 | 5 GCGGAUCAAACCUCACCAA 3 |
| | | | | AS | 2131 | 3 CGCCUAGUUUGGAGUGGUU 5 |
| | | | AL-DP-4014 | S | 2132 | 5 GCGGAUCAAACCUCACCAATT 3 |
| | | | | AS | 2133 | 3 TTCGCCUAGUUUGGAGUGGUU 5 |
| | | | AL-DP-4119 | S | 2134 | 5 GCGGAUCAAACCUCACCAA 3 |
| | | | | AS | 2135 | 3 CGCCUAGUUUGGAGUGGUU 5 |
| 321 | 2251 | GCGGAUCAAACCUCACCAAGGCC | AL-DP-4013 | S | 2136 | 5 GGAUCAAACCUCACCAAGGCC 3 |
| | | | | AS | 2137 | 3 CGCCUAGUUUGGAGUGGUUCCGG 5 |
| 341 | 2252 | GCCAGCACAUAGGAGAGAUGAGC | AL-DP-4075 | S | 2138 | 5 CAGCACAUAGGAGAGAUGAGC 3 |
| | | | | AS | 2139 | 3 CGGUCGUGUAUCCUCUCUACUCG 5 |
| | | | AL-DP-4105 | S | 2140 | 5 CAGCACAUAGGAGAGAUGATT 3 |
| | | | | AS | 2141 | 3 TTGUCGUGUAUCCUCUCUACU 5 |
| 342 | 2253 | CCAGCACAUAGGAGAGAUGAGCU | AL-DP-4050 | S | 2142 | 5 AGCACAUAGGAGAGAUGAGCU 3 |
| | | | | AS | 2143 | 3 GGUCGUGUAUCCUCUCUACUCGA 5 |
| | | | AL-DP-4106 | S | 2144 | 5 AGCACAUAGGAGAGAUGAGTT 3 |
| | | | | AS | 2145 | 3 TTUCGUGUAUCCUCUCUACUC 5 |
| 343 | 2254 | CAGCACAUAGGAGAGAUGAGCUU | AL-DP-4094 | S | 2146 | 5 GCACAUAGGAGAGAUGAGCUU 3 |
| | | | | AS | 2147 | 3 GUCGUGUAUCCUCUCUACUCGAA 5 |
| | | | AL-DP-4118 | S | 2148 | 5 GCACAUAGGAGAGAUGAGCUU 3 |
| | | | | AS | 2149 | 3 CGUGUAUCCUCUCUACUCGAA 5 |
| | | | AL-DP-4107 | S | 2150 | 5 GCACAUAGGAGAGAUGAGCTT 3 |
| | | | | AS | 2151 | 3 TTCGUGUAUCCUCUCUACUCG 5 |
| | | | AL-DP-4122 | S | 2152 | 5 GCACAUAGGAGAGAUGAGC 3 |
| | | | | AS | 2153 | 3 CGUGUAUCCUCUCUACUCG 5 |
| 344 | 2255 | AGCACAUAGGAGAGAUGAGCUUC | AL-DP-4012 | S | 2154 | 5 CACAUAGGAGAGAUGAGCUUC 3 |
| | | | | AS | 2155 | 3 UCGUGUAUCCUCUCUACUCGAAG 5 |
| | | | AL-DP-4108 | S | 2156 | 5 CACAUAGGAGAGAUGAGCUTT 3 |
| | | | | AS | 2157 | 3 TTGUGUAUCCUCUCUACUCGA 5 |
| 346 | 2256 | CACAUAGGAGAGAUGAGCUUCCU | AL-DP-4051 | S | 2158 | 5 CAUAGGAGAGAUGAGCUUCCU 3 |
| | | | | AS | 2159 | 3 GUGUAUCCUCUCUACUCGAAGGA 5 |
| | | | AL-DP-4061 | S | 2160 | 5 CAUAGGAGAGAUGAGCUUCTT 3 |
| | | | | AS | 2161 | 3 TTGUAUCCUCUCUACUCGAAG 5 |
| 349 | 2257 | AUAGGAGAGAUGAGCUUCCUACA | AL-DP-4082 | S | 2162 | 5 AGGAGAGAUGAGCUUCCUACA 3 |
| | | | | AS | 2163 | 3 UAUCCUCUCUACUCGAAGGAUGU 5 |
| 369 | 2258 | ACAGCACAACAAAUGUGAAUGCA | AL-DP-4079 | S | 2164 | 5 AGCACAACAAAUGUGAAUGCA 3 |
| | | | | AS | 2165 | 3 UGUCGUGUUGUUUACACUUACGU 5 |
| 372 | 2259 | GCACAACAAAUGUGAAUGCAGAC | AL-DP-4097 | S | 2166 | 5 ACAACAAAUGUGAAUGCAGAC 3 |
| | | | | AS | 2167 | 3 CGUGUUGUUUACACUUACGUCUG 5 |
| 379 | 2260 | AAAUGUGAAUGCAGACCAAAGAA | AL-DP-4067 | S | 2168 | 5 AUGUGAAUGCAGACCAAAGTT 3 |
| | | | | AS | 2169 | 3 TTUACACUUACGUCUGGUUUC 5 |
| 380 | 2261 | AAUGUGAAUGCAGACCAAAGAAA | AL-DP-4092 | S | 2170 | 5 UGUGAAUGCAGACCAAAGATT 3 |
| | | | | AS | 2171 | 3 TTACACUUACGUCUGGUUUCU 5 |
| 381 | 2262 | AUGUGAAUGCAGACCAAAGAAAG | AL-DP-4004 | S | 2172 | 5 GUGAAUGCAGACCAAAGAAAG 3 |
| | | | | AS | 2173 | 3 UACACUUACGUCUGGUUUCUUUC 5 |
| | | | AL-DP-4117 | S | 2174 | 5 GUGAAUGCAGACCAAAGAAAG 3 |
| | | | | AS | 2175 | 3 CACUUACGUCUGGUUUCUUUC 5 |
| | | | AL-DP-4016 | S | 2176 | 5 GUGAAUGCAGACCAAAGAATT 3 |
| | | | | AS | 2177 | 3 TTCACUUACGUCUGGUUUCUU 5 |
| | | | AL-DP-4121 | S | 2178 | 5 GUGAAUGCAGACCAAAGAA 3 |
| | | | | AS | 2179 | 3 CACUUACGUCUGGUUUCUU 5 |
| 383 | 2263 | GUGAAUGCAGACCAAAGAAAGAU | AL-DP-4005 | S | 2180 | 5 GAAUGCAGACCAAAGAAAGAU 3 |
| | | | | AS | 2181 | 3 CACUUACGUCUGGUUUCUUUCUA 5 |
| | | | AL-DP-4053 | S | 2182 | 5 GAAUGCAGACCAAAGAAAGTT 3 |
| | | | | AS | 2183 | 3 TTCUUACGUCUGGUUUCUUUC 5 |

Strand:
S = sense,
AS = Antisense

### Example 2

### Eg5 siRNA in vitro Screening via Cell Proliferation

[0391] As silencing of Eg5 has been shown to cause mitotic arrest (Weil, D, et at [2002] Biotechniques 33: 1244-8), a cell viability assay was used for siRNA activity screening. HeLa cells (14000 per well [Screens 1 and 3] or 10000 per well [Screen2])) were seeded in 96-well plates and simultaneously transfected with Lipofectamine 2000 (Invitrogen) at a final siRNA concentration in the well of 30 nM and at final concentrations of 50 nM (1^{st} screen) and 25 nM (2^{nd} screen). A subset of duplexes was tested at 25 nM in a third screen (Table 5).

[0392] Seventy-two hours post-transfection, cell proliferation was assayed the addition of WST-1 reagent (Roche) to the culture medium, and subsequent absorbance measurement at 450 nm. The absorbance value for control (non-transfected) cells was considered 100 percent, and absorbances for the siRNA transfected wells were compared to the control value. Assays were performed in sextuplicate for each of three screens. A subset of the siRNAs was further tested at a range of siRNA concentrations. Assays were performed in HeLa cells (14000 per well;

[0393] method same as above, Table 5).

TABLE 5
Effects of Eg5 targeted duplexes on cell viability at 25 nM.

| | Relative absorbance at 450 nm | | | | | |
|---|---|---|---|---|---|---|
| | Screen I | | Screen II | | Screen III | |
| Duplex | mean | sd | Mean | sd | mean | Sd |
| AL-DP-6226 | 20 | 10 | 28 | 11 | 43 | 9 |
| AL-DP-6227 | 66 | 27 | 96 | 41 | 108 | 33 |
| AL-DP-6228 | 56 | 28 | 76 | 22 | 78 | 18 |
| AL-DP-6229 | 17 | 3 | 31 | 9 | 48 | 13 |
| AL-DP-6230 | 48 | 8 | 75 | 11 | 73 | 7 |
| AL-DP-6231 | 8 | 1 | 21 | 4 | 41 | 10 |
| AL-DP-6232 | 16 | 2 | 37 | 7 | 52 | 14 |
| AL-DP-6233 | 31 | 9 | 37 | 6 | 49 | 12 |
| AL-DP-6234 | 103 | 40 | 141 | 29 | 164 | 45 |
| AL-DP-6235 | 107 | 34 | 140 | 27 | 195 | 75 |
| AL-DP-6236 | 48 | 12 | 54 | 12 | 56 | 12 |
| AL-DP-6237 | 73 | 14 | 108 | 18 | 154 | 37 |
| AL-DP-6238 | 64 | 9 | 103 | 10 | 105 | 24 |
| AL-DP-6239 | 9 | 1 | 20 | 4 | 31 | 11 |
| AL-DP-6240 | 99 | 7 | 139 | 16 | 194 | 43 |
| AL-DP-6241 | 43 | 9 | 54 | 12 | 66 | 19 |
| AL-DP-6242 | 6 | 1 | 15 | 7 | 36 | 8 |
| AL-DP-6243 | 7 | 2 | 19 | 5 | 33 | 13 |
| AL-DP-6244 | 7 | 2 | 19 | 3 | 37 | 13 |
| AL-DP-6245 | 25 | 4 | 45 | 10 | 58 | 9 |
| AL-DP-6246 | 34 | 8 | 65 | 10 | 66 | 13 |
| AL-DP-6247 | 53 | 6 | 78 | 14 | 105 | 20 |
| AL-DP-6248 | 7 | 0 | 22 | 7 | 39 | 12 |
| AL-DP-6249 | 36 | 8 | 48 | 13 | 61 | 7 |

[0394] The nine siRNA duplexes that showed the greatest growth inhibition in Table 5 were re-tested at a range of siRNA concentrations in HeLa cells. The siRNA concentrations tested were 100 nM, 33.3 nM, 11.1 nM, 3.70 nM, 1.23 nM, 0.41 nM, 0.14 nM and 0.046 nM. Assays were performed in sextuplicate, and the concentration of each siRNA resulting in fifty percent inhibition of cell proliferation (IC₅₀) was calculated. This dose-response analysis was performed between two and four times for each duplex. Mean IC₅₀ values (nM) are given in Table 6.

TABLE 6
IC50 of siRNA: cell proliferation in HeLa cells

| Duplex | Mean IC₅₀ |
|---|---|
| AL-DP-6226 | 15.5 |
| AL-DP-6229 | 3.4 |
| AL-DP-6231 | 4.2 |
| AL-DP-6232 | 17.5 |
| AL-DP-6239 | 4.4 |
| AL-DP-6242 | 5.2 |
| AL-DP-6243 | 2.6 |
| AL-DP-6244 | 8.3 |
| AL-DP-6248 | 1.9 |

### Example 3

### Eg5 siRNA in vitro Screening via mRNA Inhibition

[0395] Directly before transfection, HeLa S3 (ATCC-Number: CCL-2.2, LCG Promochem GmbH, Wesel, Germany) cells were seeded at 1.5×10⁴ cells/well on 96-well plates (Greiner Bio-One GmbH, Frickenhausen, Germany) in 75 μl of growth medium (Ham's F12, 10% fetal calf serum, 100 u penicillin/100 μg/ml streptomycin, all from Bookroom AG, Berlin, Germany). Transfections were performed in quadruplicates. For each well 0.5 μl Lipofectamine2000 (Invitrogen GmbH, Karlsruhe, Germany) were mixed with 12 μl Opti-MEM (Invitrogen) and incubated for 15 min at room temperature. For the siRNA concentration being 50 nM in the 100 μl transfection volume, 1 μl of a 5 μM siRNA were mixed with 11.5 μl Opti-MEM per well, combined with the Lipofectamine2000-Opti-MEM mixture and again incubated for 15 minutes at room temperature. siRNA-Lipofectamine2000-complexes were applied completely (25 μl each per well) to the cells and cells were incubated for 24 h at 37° C. and 5% CO₂ in a humidified incubator (Heroes GmbH, Hanau). The single dose screen was done once at 50 nM and at 25 nM, respectively.

[0396] Cells were harvested by applying 50 μl of lysis mixture (content of the QuantiGene bDNA-kit from Genospectra, Fremont, USA) to each well containing 100 μl of growth medium and were lysed at 53° C. for 30 min. Afterwards, 50 μl of the lists were incubated with probe sets specific to human Eg5 and human GAPDH and proceeded according to the manufacturer's protocol for QuantiGene. In the end chemoluminescence was measured in a Victor2-Light (Perkin Elmer, Wiesbaden, Germany) as RLUs (relative light units) and values obtained with the hEg5 probe set were normalized to the respective GAPDH values for each well. Values obtained with siRNAs directed against Eg5 were related to the value obtained with an unspecific siRNA (directed against HCV) which was set to 100% (Tables 1b, 2b and 3b).

[0397] Effective siRNAs from the screen were further characterized by dose response curves. Transfections of dose response curves were performed at the following concentrations: 100 nM, 16.7 nM, 2.8 nM, 0.46 nM, 77 picoM, 12.8 picoM, 2.1 picoM, 0.35 picoM, 59.5 fM, 9.9 fM and mock (no siRNA) and diluted with Opti-MEM to a final concentration of 12.5 μl according to the above protocol. Data analysis was performed by using the Microsoft Excel add-in software XL-fit 4.2 (IDBS, Guildford, Surrey, UK) and applying the dose response model number 205 (Tables 1b, 2b and 3b).

[0398] The lead siRNA AD12115 was additionally analyzed by applying the WST-proliferation assay from Roche (as previously described).

[0399] A subset of 34 duplexes from Table 2 that showed greatest activity was assayed by transfection in HeLa cells at final concentrations ranging from 100 nM to 10 fM. Transfections were performed in quadruplicate. Two dose-response assays were performed for each duplex. The concentration giving 20% (IC20), 50% (IC50) and 80% (IC80) reduction of KSP mRNA was calculated for each duplex (Table 7).

TABLE 7
Dose response mRNA inhibition of Eg5/KSP duplexes in HeLa cells
Concentrations given in pM

| | IC20s | | IC50s | | IC80s | |
|---|---|---|---|---|---|---|
| | 1^{st} | 2^{nd} | 1st | 2nd | 1st | 2nd |
| Duplex name | screen | screen | screen | screen | screen | screen |
| AD12077 | 1.19 | 0.80 | 6.14 | 10.16 | 38.63 | 76.16 |
| AD12078 | 25.43 | 25.43 | 156.18 | 156.18 | ND | ND |
| AD12085 | 9.08 | 1.24 | 40.57 | 8.52 | 257.68 | 81.26 |
| AD12095 | 1.03 | 0.97 | 9.84 | 4.94 | 90.31 | 60.47 |
| AD12113 | 4.00 | 5.94 | 17.18 | 28.14 | 490.83 | 441.30 |
| AD12115 | 0.60 | 0.41 | 3.79 | 3.39 | 23.45 | 23.45 |
| AD12125 | 31.21 | 22.02 | 184.28 | 166.15 | 896.85 | 1008.11 |
| AD12134 | 2.59 | 5.51 | 17.87 | 22.00 | 116.36 | 107.03 |
| AD12149 | 0.72 | 0.50 | 4.51 | 3.91 | 30.29 | 40.89 |
| AD12151 | 0.53 | 6.84 | 4.27 | 10.72 | 22.88 | 43.01 |
| AD12152 | 155.45 | 7.56 | 867.36 | 66.69 | 13165.27 | ND |
| AD12157 | 0.30 | 26.23 | 14.60 | 92.08 | 14399.22 | 693.31 |
| AD12166 | 0.20 | 0.93 | 3.71 | 3.86 | 46.28 | 20.59 |
| AD12180 | 28.85 | 28.85 | 101.06 | 101.06 | 847.21 | 847.21 |
| AD12185 | 2.60 | 0.42 | 15.55 | 13.91 | 109.80 | 120.63 |
| AD12194 | 2.08 | 1.11 | 5.37 | 5.09 | 53.03 | 30.92 |
| AD12211 | 5.27 | 4.52 | 11.73 | 18.93 | 26.74 | 191.07 |
| AD12257 | 4.56 | 5.20 | 21.68 | 22.75 | 124.69 | 135.82 |
| AD12280 | 2.37 | 4.53 | 6.89 | 20.23 | 64.80 | 104.82 |
| AD12281 | 8.81 | 8.65 | 19.68 | 42.89 | 119.01 | 356.08 |
| AD12282 | 7.71 | 456.42 | 20.09 | 558.00 | ND | ND |
| AD12285 | ND | 1.28 | 57.30 | 7.31 | 261.79 | 42.53 |
| AD12292 | 40.23 | 12.00 | 929.11 | 109.10 | ND | ND |
| AD12252 | 0.02 | 18.63 | 6.35 | 68.24 | 138.09 | 404.91 |
| AD12275 | 25.76 | 25.04 | 123.89 | 133.10 | 1054.54 | 776.25 |
| AD12266 | 4.85 | 7.80 | 10.00 | 32.94 | 41.67 | 162.65 |
| AD12267 | 1.39 | 1.21 | 12.00 | 4.67 | 283.03 | 51.12 |
| AD12264 | 0.92 | 2.07 | 8.56 | 15.12 | 56.36 | 196.78 |
| AD12268 | 2.29 | 3.67 | 22.16 | 25.64 | 258.27 | 150.84 |
| AD12279 | 1.11 | 28.54 | 23.19 | 96.87 | 327.28 | 607.27 |
| AD12256 | 7.20 | 33.52 | 46.49 | 138.04 | 775.54 | 1076.76 |
| AD12259 | 2.16 | 8.31 | 8.96 | 40.12 | 50.05 | 219.42 |
| AD12276 | 19.49 | 6.14 | 89.60 | 59.60 | 672.51 | 736.72 |
| AD12321 | 4.67 | 4.91 | 24.88 | 19.43 | 139.50 | 89.49 |

(ND—not determined)

### Example 4

### Silencing of Liver Eg5/KSP in Juvenile Rats Following Single-bolus Administration of LNP01 Formulated siRNA

[0400] From birth until approximately 23 days of age, Eg5/KSP expression can be detected in the growing rat liver. Target silencing with a formulated Eg5/KSP siRNA was evaluated in juvenile rats using duplex AD-6248.

[0401] KSP Duplex Tested

| | | | |
|---|---|---|---|
| Duplex ID | Target | Sense | Antisense |

| | | | |
|---|---|---|---|
| AD6248 | KSP | AccGAAGuGuuGuuuGuccTsT | GGAcAAAcAAcACUUCGGUTsT |
| | | (SEQ ID NO: 1238) | (SEQ ID NO: 1239) |

[0402] Methods

[0403] Dosing of animals. Male, juvenile Sprague-Dawley rats (19 days old) were administered single doses of lipidoid (“LNP01”) formulated siRNA via tail vein injection. Groups of ten animals received doses of 10 milligrams per kilogram (mg/kg) bodyweight of either AD6248 or an unspecific siRNA. Dose level refers to the amount of siRNA duplex administered in the formulation. A third group received phosphate-buffered saline. Animals were sacrificed two days after siRNA administration. Livers were dissected, flash frozen in liquid Nitrogen and pulverized into powders.

[0404] mRNA measurements. Levels of Eg5/KSP mRNA were measured in livers from all treatment groups. Samples of each liver powder (approximately ten milligrams) were homogenized in tissue lysis buffer containing proteinase K. Levels of Eg5/KSP and GAPDH mRNA were measured in triplicate for each sample using the Quantigene branched DNA assay (GenoSpectra). Mean values for Eg5/KSP were normalized to mean GAPDH values for each sample. Group means were determined and normalized to the PBS group for each experiment.

[0405] Statistical analysis. Significance was determined by ANOVA followed by the Tukey post-hoc test.

[0406] Results

[0407] Data Summary

[0408] Mean values (±standard deviation) for Eg5/KSP mRNA are given. Statistical significance (p value) versus the PBS group is shown (ns, not significant [p>0.05]).

TABLE 8
Experiment 1

| | | KSP/GAPDH | p value |
|---|---|---|---|
| PBS | | 1.0 ± 0.47 | |
| AD6248 | 10 mg/kg | 0.47 ± 0.12 | <0.001 |
| unspec | 10 mg/kg | 1.0 ± 0.26 | ns |

[0409] A statistically significant reduction in liver Eg5/KSP mRNA was obtained following treatment with formulated AD6248 at a dose of 10 mg/kg.

### Example 5

### Silencing of Rat Liver VEGF Following Intravenous Infusion of LNP01 Formulated VSP

[0410] A “lipidoid” formulation comprising an equimolar mixture of two siRNAs was administered to rats. As used herein, VSP refers to a composition having two siRNAs, one directed to Eg5/KSP and one directed to VEGF. For this experiment the duplex AD3133 directed towards VEGF and AD12115 directed towards Eg5/KSP were used. Since Eg5/KSP expression is nearly undetectable in the adult rat liver, only VEGF levels were measured following siRNA treatment.

[0411] siRNA Duplexes Administered (VSP)

| Duplex | | | |
|---|---|---|---|
| ID | Target | Sense | Antisense |
| AD12115 | Eg5/KSP | ucGAGAAucuAAAcuAAcuTsT | AGUuAGUUuAGAUUCUCGATsT |
| | | (SEQ ID NO: 1240) | (SEQ ID NO: 1241) |
| AD3133 | VEGF | GcAcAuAGGAGAGAuGAGCUsU | AAGCUcAUCUCUCCuAuGuGCusG |
| | | (SEQ ID NO: 1242) | (SEQ ID NO: 1243) |

[0412] Key: A,G,C,U-ribonucleotides; c,u-2′-O-Me ribonucleotides; s-phosphorothioate.

[0413] Unmodified versions of each strand and the targets for each siRNA are as follows

| | | |
|---|---|---|
| Eg5/KSP | unmod sense | 5′ UCGAGAAUCUAAACUAACUTT 3′ SEQ ID NO: 1534 |
| | unmod antisense | 3′ TTAGUCCUUAGAUUUGAUUGA 5′ SEQ ID NO: 1535 |
| | target | 5′ UCGAGAAUCUAAACUAACU 3′ SEQ ID NO: 1311 |
| VEGF | unmod sense | 5′ GCACAUAGGAGAGAUGAGCUU 3′ SEQ ID NO: 1536 |
| | unmod antisense | 3′ GUCGUGUAUCCUCUCUACUCGAA 5′ SEQ ID NO: 1537 |
| | target | 5′ GCACAUAGGAGAGAUGAGCUU 3′ SEQ ID NO: 1538 |

### Methods

[0414] Dosing of animals. Adult, female Sprague-Dawley rats were administered lipidoid (“LNP01”) formulated siRNA by a two-hour infusion into the femoral vein. Groups of four animals received doses of 5, 10 and 15 milligrams per kilogram (mg/kg) bodyweight of formulated siRNA. Dose level refers to the total amount of siRNA duplex administered in the formulation. A fourth group received phosphate-buffered saline. Animals were sacrificed 72 hours after the end of the siRNA infusion. Livers were dissected, flash frozen in liquid Nitrogen and pulverized into powders.

[0415] Formulation Procedure

[0416] The lipidoid ND98.4HCl (MW 1487) (Formula 1, above), Cholesterol (Sigma-Aldrich), and PEG-Ceramide C16 (Avanti Polar Lipids) were used to prepare lipid-siRNA nanoparticles. Stock solutions of each in ethanol were prepared: ND98, 133 mg/mL; Cholesterol, 25 mg/mL, PEG-Ceramide C16, 100 mg/mL. ND98, Cholesterol, and PEG-Ceramide C16 stock solutions were then combined in a 42:48:10 molar ratio. Combined lipid solution was mixed rapidly with aqueous siRNA (in sodium acetate pH 5) such that the final ethanol concentration was 35-45% and the final sodium acetate concentration was 100-300 mM. Lipid-siRNA nanoparticles formed spontaneously upon mixing. Depending on the desired particle size distribution, the resultant nanoparticle mixture was in some cases extruded through a polycarbonate membrane (100 nm cut-off) using a thermobarrel extruder (Lipex Extruder, Northern Lipids, Inc). In other cases, the extrusion step was omitted. Ethanol removal and simultaneous buffer exchange was accomplished by either dialysis or tangential flow filtration. Buffer was exchanged to phosphate buffered saline (PBS) pH 7.2.

[0417] Characterization of Formulations

[0418] Formulations prepared by either the standard or extrusion-free method are characterized in a similar manner. Formulations are first characterized by visual inspection. They should be whitish translucent solutions free from aggregates or sediment. Particle size and particle size distribution of lipid-nanoparticles are measured by dynamic light scattering using a Malvern Zetasizer Nano ZS (Malvern, USA). Particles should be 20-300 nm, and ideally, 40-100 nm in size. The particle size distribution should be unimodal. The total siRNA concentration in the formulation, as well as the entrapped fraction, is estimated using a dye exclusion assay. A sample of the formulated siRNA is incubated with the RNA-binding dye Ribogreen (Molecular Probes) in the presence or absence of a formulation disrupting surfactant, 0.5% Triton-X100. The total siRNA in the formulation is determined by the signal from the sample containing the surfactant, relative to a standard curve. The entrapped fraction is determined by subtracting the “free” siRNA content (as measured by the signal in the absence of surfactant) from the total siRNA content. Percent entrapped siRNA is typically >85%. For SNALP formulation, the particle size is at least 30 nm, at least 40 nm, at least 50 nm, at least 60 nm, at least 70 nm, at least 80 nm, at least 90 nm, at least 100 nm, at least 110 nm, and at least 120 nm. The preferred range is about at least 50 nm to about at least 110 nm, preferably about at least 60 nm to about at least 100 nm, most preferably about at least 80 nm to about at least 90 nm. In one example, each of the particle size comprises at least about 1:1 ratio of Eg5 dsRNA to VEGF dsRNA.

[0419] mRNA measurements. Samples of each liver powder (approximately ten milligrams) were homogenized in tissue lysis buffer containing proteinase K. Levels of VEGF and GAPDH mRNA were measured in triplicate for each sample using the Quantigene branched DNA assay (GenoSpectra). Mean values for VEGF were normalized to mean GAPDH values for each sample. Group means were determined and normalized to the PBS group for each experiment.

[0420] Protein measurements. Samples of each liver powder (approximately 60 milligrams) were homogenized in 1 ml RIPA buffer. Total protein concentrations were determined using the Micro BCA protein assay kit (Pierce). Samples of total protein from each animal were used to determine VEGF protein levels using a VEGF ELISA assay (R&D systems). Group means were determined and normalized to the PBS group for each experiment.

[0421] Statistical analysis. Significance was determined by ANOVA followed by the Tukey post-hoc test

[0422] Results

[0423] Data Summary

[0424] Mean values (±standard deviation) for mRNA (VEGF/GAPDH) and protein (rel. VEGF) are shown for each treatment group. Statistical significance (p value) versus the PBS group for each experiment is shown.

TABLE 9

| | VEGF/GAPDH | p value | rel VEGF | p value |
|---|---|---|---|---|
| PBS | 1.0 ± 0.17 | | 1.0 ± 0.17 | |
| 5 mg/kg | 0.74 ± 0.12 | <0.05 | 0.23 ± 0.03 | <0.001 |
| 10 mg/kg | 0.65 ± 0.12 | <0.005 | 0.22 ± 0.03 | <0.001 |
| 15 mg/kg | 0.49 ± 0.17 | <0.001 | 0.20 ± 0.04 | <0.001 |

[0425] Statistically significant reductions in liver VEGF mRNA and protein were measured at all three siRNA dose levels.

### Example 6

### Assessment of VSP SNALP in Mouse Models of Human Hepatic tumors

[0426] These studies utilized a VSP siRNA cocktail containing dsRNAs targeting KSP/Eg5 and dsRNAs targeting VEGF. As used herein, VSP refers to a composition having two siRNAs, one directed to Eg5/KSP and one directed to VEGF. For this experiment the duplexes AD3133 (directed towards VEGF) and AD12115 (directed towards Eg5/KSP) were used. The siRNA cocktail was formulated in SNALP as described below.

[0427] The maximum study size utilized 20-25 mice. To test the efficacy of the siRNA SNALP cocktail to treat liver cancer, 1×10̂6 tumor cells were injected directly into the left lateral lobe of test mice. The incisions were closed by sutures, and the mice allowed to recover for 2-5 hours. The mice were fully recovered within 48-72 hours. The SNALP siRNA treatment was initiated 8-11 days after tumor seeding.

[0428] The SNALP formulations utilized were (i) VSP (KSP+VEGF siRNA cocktail (1:1 molar ratio)); (ii) KSP (KSP+Luc siRNA cocktail); and (iii) VEGF (VEGF+Luc siRNA cocktail). All formulations contained equal amounts (mg) of each active siRNA. All mice received a total siRNA/lipid dose, and each cocktail was formulated into 1:57 cDMA SNALP (1.4% PEG-cDMA; 57.1% DLinDMA; 7.1% DPPC; and 34.3% cholesterol), 6:1 lipid:drug using original citrate buffer conditions.

[0429] Human Hep3B Study A: Anti-Tumor Activity of VSP-SNALP

[0430] Human Hepatoma Hep3B tumors were established in scid/beige mice by intrahepatic seeding. Group A (n=6) animals were administered PBS; Group B (n=6) animals were administered VSP SNALP; Group C (n=5) animals were administered KSP/Luc SNALP; Group D (n=5) animals were administered VEGF/Luc SNALP.

[0431] SNALP treatment was initiated eight days after tumor seeding. The SNALP was dosed at 3 mg/kg total siRNA, twice weekly (Monday and Thursday), for a total of six doses (cumulative 18 mg/kg siRNA). The final dose was administered at day 25, and the terminal endpoint was at day 27.

[0432] Tumor burden was assayed by (a) body weight; (b) liver weight; (c) visual inspection+photography at day 27; (d) human-specific mRNA analysis; and (e) blood alpha-fetoprotein levels measured at day 27.

[0433] Table 10 below illustrates the results of visual scoring of tumor burden measured in the seeded (left lateral) liver lobe. Score: “−”=no visible tumor; “+”=evidence of tumor tissue at injection site; “++”=Discrete tumor nodule protruding from liver lobe; “+++”=large tumor protruding on both sides of liver lobe; “++++”=large tumor, multiple nodules throughout liver lobe.

TABLE 10

| | Mouse | Tumor Burden |
|---|---|---|
| Group A: PBS, day 27 | 1 | ++++ |
| | 2 | ++++ |
| | 3 | ++ |
| | 4 | +++ |
| | 5 | ++++ |
| | 6 | ++++ |
| Group B: VSP | 1 | + |
| (VEGF + KSP/Eg5, d. 27 | 2 | − |
| | 3 | − |
| | 4 | − |
| | 5 | ++ |
| | 6 | − |
| Group C: KSP | 1 | + |
| (Luc + KSP), d. 27 | 2 | ++ |
| | 3 | − |
| | 4 | + |
| | 5 | ++ |
| Group D: VEGF | 1 | ++++ |
| (Luc + VEGF), d. 27 | 2 | − |
| | 3 | ++++ |
| | 4 | +++ |
| | 5 | ++++ |

[0434] Liver weights, as percentage of body weight, are shown in FIG. 1. FIG. 2A, FIG. 2B, FIG. 2C and FIG. 2D show the effects of PBS, VSP, KSP and VEGF on body weight on Human Hepatoma Hep3B tumors in mice.

[0435] From this study, the following conclusions were made. (1) VSP SNALP demonstrated potent anti-tumor effects in Hep3B 1H model; (2) the anti-tumor activity of the VSP cocktail appeared largely associated with the KSP component; (3) anti-KSP activity was confirmed by single dose histological analysis; and (4) VEGF siRNA showed no measurable effect on inhibition of tumor growth in this model.

[0436] Human Hep3B Study B: Prolonged Survival with VSP Treatment

[0437] In a second Hep3B study, human hepatoma Hep3B tumors were established by intrahepatic seeding into scid/beige mice. These mice were deficient for lymphocytes and natural killer (NK) cells, which is the minimal scope for immune-mediated anti-tumor effects. Group A (n=6) mice were untreated; Group B (n=6) mice were administered luciferase (luc) 1955 SNALP (Lot No. AP10-02); and Group C (n=7) mice were administered VSP SNALP (Lot No. AP10-01). SNALP was 1:57 cDMA SNALP, and 6:1 lipid:drug.

[0438] SNALP treatment was initiated eight days after tumor seeding. SNALP was dosed at 3 mg/kg siRNA, twice weekly (Mondays and Thursdays), for a total of six doses (cumulative 18 mg/kg siRNA). The final dose was delivered at day 25, and the terminal endpoint of the study was at day 27.

[0439] Tumor burden was assayed by (1) body weight; (2) visual inspection+photography at day 27; (3) human-specific mRNA analysis; and (4) blood alpha-fetoprotein measured at day 27.

[0440] FIG. 3 shows body weights were measured at each day of dosing (days 8, 11, 14, 18, 21, and 25) and on the day of sacrifice.

TABLE 11

| | | Tumor Burden |
|---|---|---|
| | | by macroscopic |
| | Mouse | observation |
| Group A: untreated, | A1R | ++ |
| day 27 | A1G | ++++ |
| | A1W | − |
| | A2R | ++++ |
| | A2G | +++ |
| | A2W | ++++ |
| Group B: | B1R | ++++ |
| 1955 Luc SNALP, day 27 | B1G | ++++ |
| | B1W | +++ |
| | B2R | ++ |
| | B2G | +++ |
| | B2W | ++++ |
| Group C: | C1R | − |
| VSP SNALP, day 27 | C1G | − |
| | C1B | − |
| | C1W | + |
| | C2R | + |
| | C2G | + |
| | C2W | − |

Score:
“−” = no visible tumor;
“+” = evidence of tumor tissue at injection site;
“++” = Discrete tumor nodule protruding from liver lobe;
“+++” = large tumor protruding on both sides of liver lobe;
“++++” = large tumor, multiple nodules throughout liver lobe.

[0441] The correlation between body weights and tumor burden are shown in FIGS. 4, 5 and 6. FIG. 4 shows percentage body weight over 27 days in untreated mice. FIG. 5 shows percentage body weight over 27 days in 1955 Luc SNALP treated mice. FIG. 6 shows percentage body weight over 27 days in VSP SNALP treated mice.

[0442] A single dose of VSP SNALP (2 mg/kg) to Hep3B mice also resulted in the formation of mitotic spindles in liver tissue samples examined by histological staining

[0443] Tumor burden was quantified by quantitative RT-PCR (pRT-PCR) (Taqman). Human GAPDH was normalized to mouse GAPDH via species-specific Taqman assays. FIG. 7A shows tumor scores as shown by macroscopic observation in the table above correlated with GADPH levels.

[0444] Serum ELISA was performed to measure alpha-fetoprotein (AFP) secreted by the tumor. As described below, if levels of AFP go down after treatment, the tumor is not growing. FIG. 7B shows that the treatment with VSP lowered AFP levels in some animals compared to treatment with controls.

[0445] Human HepB3 Study C:

[0446] In a third study, human HCC cells (HepB3) were injected directly into the liver of SCID/beige mice, and treatment was initiated 20 days later. Group A animals were administered PBS; Group B animals were administered 4 mg/kg Luc-1955 SNALP; Group C animals were administered 4 mg/kg SNALP-VSP; Group D animals were administered 2 mg/kg SNALP-VSP; and Group E animals were administered 1 mg/kg SNALP-VSP. Treatment was with a single intravenous (iv) dose, and mice were sacrificed 24 hr. later.

[0447] Tumor burden and target silencing was assayed by qRT-PCR (Taqman). Tumor score was also measured visually as described above, and the results are shown in the following table. hGAPDH levels, as shown in FIG. 8, correlates with macroscopic tumor score as shown in the table below.

TABLE 12

| | | Tumor Burden by macroscopic |
|---|---|---|
| | Mouse | observation |
| Group A: PBS | A2 | +++ |
| | A3 | +++ |
| | A4 | +++ |
| Group B: 4 mg/kg Luc- | B1 | + |
| 1955 SNALP | B2 | +++ |
| | B3 | +++ |
| | B4 | +++ |
| Group C: 4 mg/kg | C1 | ++ |
| SNALP-VSP | C2 | ++ |
| | C3 | ++ |
| | C4 | +++ |
| Group D: 2 mg/kg | D1 | ++ |
| SNALP-VSP | D2 | + |
| | D3 | + |
| | D4 | ++ |
| Group E: 1 mg/kg | E1 | +++ |
| SNALP-VSP | E2 | + |
| | E3 | ++ |
| | E4 | + |

[0448] Score: “+”=variable tumor take/some small tumors; “++”=Discrete tumor nodule protruding from liver lobe; “+++”=large tumor protruding on both sides of liver lobe

[0449] Human (tumor-derived) KSP silencing was assayed by Taqman analysis and the results are shown in FIG. 9. hKSP expression was normalized to hGAPDH. About 80% tumor KSP silencing was observed at 4 mg/kg SNALP-VSP, and efficacy was evident at 1 mg/kg. The clear bars in FIG. 9 represent the results from small (low GAPDH) tumors.

[0450] Human (tumor-derived) VEGF silencing was assayed by Taqman analysis and the results are shown in FIG. 10. hVEGF expression was normalized to hGAPDH. About 60% tumor VEGF silencing was observed at 4 mg/kg SNALP-VSP, and efficacy was evident at 1 mg/kg. The clear bars in FIG. 10 represent the results from small (low GAPDH) tumors.

[0451] Mouse (liver-derived) VEGF silencing was assayed by Taqman analysis and the results are shown in FIG. 11A. mVEGF expression was normalized to hGAPDH. About 50% liver VEGF silencing was observed at 4 mg/kg SNALP-VSP, and efficacy was evident at 1 mg/kg.

[0452] Human HepB3 Study D: Contribution of Each dsRNA to Tumor Growth

[0453] In a fourth study, human HCC cells (HepB3) were injected directly into the liver of SCID/beige mice, and treatment was initiated 8 days later. Treatment was with intravenous (iv) bolus injections, twice weekly, for a total of six does. The final dose was administered at day 25, and the terminal endpoint was at day 27.

[0454] Tumor burden was assayed by gross histology, human-specific mRNA analysis (hGAPDH qPCR), and blood alpha-fetoprotein levels (serum AFP via ELISA).

[0455] In Study 1, Group A was treated with PBS, Group B was treated with SNALP-KSP+Luc (3 mg/kg), Group C was treated with SNALP-VEGF+Luc (3 mg/kg), and Group D was treated with SNALP-VSP (3 mg/kg).

[0456] In Study 2, Group A was treated with PBS; Group B was treated with SNALP-KSP+Luc (1 mg/kg), Group C was treated with ALN-VSP02 (1 mg/kg).

[0457] Both GAPDH mRNA levels and serum AFP levels were shown to decrease after treatment with SNALP-VSP (as shown in FIG. 11B).

[0458] Histology Studies:

[0459] Human hepatoma Hep3B tumors were established by intrahepatic seeding in mice. SNALP treatment was initiated 20 days after tumor seeding. Tumor-bearing mice (three per group) were treated with a single intravenous (IV) dose of (i) VSP SNALP or (ii) control (Luc) SNALP at 2 mg/kg total siRNA.

[0460] Liver/tumor samples were collected for conventional H&E histology 24 hours after single SNALP administration.

[0461] Large macroscopic tumor nodules (5-10 mm) were evident at necroscopy.

[0462] Effect of SNALP-VSP in Hep3B Mice:

[0463] SNALP-VSP (a cocktail of KSP dsRNA and VEGF dsRNA) treatment reduced tumor burden and expression of tumor-derived KSP and VEGF. GAPDH mRNA levels, a measure of tumor burden, were also observed to decline following administration of SNALP-VSP dsRNA (shown in FIG. 12A, FIG. 12B and FIG. 12C). A decrease in tumor burden by visual macroscopic observation was also evident following administration of SNALP-VSP.

[0464] A single IV bolus injection of SNALP-VSP also resulted in mitotic spindle formation that was clearly detected in liver tissue samples from Hep3B mice. This observation indicated cell cycle arrest.

### Example 7

### Survival of SNALP-VSP Animals Versus SNALP-Luc Treated Animals

[0465] To test the effect of siRNA SNALP on survival rates of cancer subjects, tumors were established by intrahepatic seeding in mice and the mice were treated with SNALP-siRNA. These studies utilized a VSP siRNA cocktail containing dsRNAs targeting KSP/Eg5 and VEGF. Control was dsRNA targeting Luc. The siRNA cocktail was formulated in SNALPs.

[0466] Tumor cells (Human Hepatoma Hep3B, 1×10̂6) were injected directly into the left lateral lobe of scid/beige mice. These mice were deficient for lymphocytes and natural killer (NK) cells, which is the minimal scope for immune-mediated anti-tumor effects. The incisions were closed by sutures, and the mice allowed to recover for 2-5 hours. The mice were fully recovered within 48-72 hours.

[0467] All mice received a total siRNA/lipid intravenous (iv) dose, and each cocktail was formulated into 1:57 cDMA SNALP (1.4% PEG-cDMA; 57.1% DLinDMA; 7.1% DPPC; and 34.3% cholesterol), 6:1 lipid:drug using original citrate buffer conditions.

[0468] siRNA-SNALP treatment was initiated on the day indicated below (18 or 26 days) after tumor seeding. siRNA-SNALP were administered twice a week for three weeks after 18 or 26 days at a dose of 4 mg/kg. Survival was monitored and animals were euthanized based on humane surrogate endpoints (e.g., animal body weight, abdominal distension/discoloration, and overall health).

[0469] The survival data for treatment initiated 18 days after tumor seeing is summarized in Table 13, Table 14, and FIG. 13A.

TABLE 13
Kaplan-Meier (survival) data (% Surviving)

| | SNALP- | SNALP- |
|---|---|---|
| Day | Luc | VSP |
| 18 | 100% | 100% |
| 22 | 100% | 100% |
| 25 | 100% | 100% |
| 27 | 100% | 100% |
| 28 | 100% | 100% |
| 28 | 86% | 100% |
| 29 | 86% | 100% |
| 32 | 86% | 100% |
| 33 | 86% | 100% |
| 33 | 43% | 100% |
| 35 | 43% | 100% |
| 36 | 43% | 100% |
| 36 | 29% | 100% |
| 38 | 29% | 100% |
| 38 | 14% | 100% |
| 38 | 14% | 88% |
| 40 | 14% | 88% |
| 43 | 14% | 88% |
| 45 | 14% | 88% |
| 49 | 14% | 88% |
| 51 | 14% | 88% |
| 51 | 14% | 50% |
| 53 | 14% | 50% |
| 53 | 14% | 25% |
| 55 | 14% | 25% |
| 57 | 14% | 25% |
| 57 | 0% | 0% |

TABLE 14
Survival in days, for each animal.

| | Treatment | | |
|---|---|---|---|
| Animal | group | Survival | |
| 1 | SNALP-Luc | 28 | days |
| 2 | SNALP-Luc | 33 | days |
| 3 | SNALP-Luc | 33 | days |
| 4 | SNALP-Luc | 33 | days |
| 5 | SNALP-Luc | 36 | days |
| 6 | SNALP-Luc | 38 | days |
| 7 | SNALP-Luc | 57 | days |
| 8 | SNALP-VSP | 38 | days |
| 9 | SNALP-VSP | 51 | days |
| 10 | SNALP-VSP | 51 | days |
| 11 | SNALP-VSP | 51 | days |
| 12 | SNALP-VSP | 53 | days |
| 13 | SNALP-VSP | 53 | days |
| 14 | SNALP-VSP | 57 | days |
| 15 | SNALP-VSP | 57 | days |

[0470] FIG. 13A shows the mean survival of SNALP-VSP animals and SNALP-Luc treated animals versus days after tumor seeding. The mean survival of SNALP-VSP animals was extended by approximately 15 days versus SNALP-Luc treated animals.

TABLE 15
Serum alpha fetoprotein (AFP) concentration, for each animal, at a
time pre-treatment and at end of treatment (concentration in μg/ml)

| | | | End of |
|---|---|---|---|
| | | pre-Rx | Rx |
| 1 | SNALP-Luc | 30.858 | 454.454 |
| 2 | SNALP-Luc | 10.088 | 202.082 |
| 3 | SNALP-Luc | 23.736 | 648.952 |
| 4 | SNALP-Luc | 1.696 | 13.308 |
| 5 | SNALP-Luc | 4.778 | 338.688 |
| 6 | SNALP-Luc | 15.004 | 826.972 |
| 7 | SNALP-Luc | 11.036 | 245.01 |
| 8 | SNALP-VSP | 37.514 | 182.35 |
| 9 | SNALP-VSP | 91.516 | 248.06 |
| 10 | SNALP-VSP | 25.448 | 243.13 |
| 11 | SNALP-VSP | 24.862 | 45.514 |
| 12 | SNALP-VSP | 57.774 | 149.352 |
| 13 | SNALP-VSP | 12.446 | 78.724 |
| 14 | SNALP-VSP | 2.912 | 9.61 |
| 15 | SNALP-VSP | 4.516 | 11.524 |

[0471] Tumor burden was monitored using serum AFP levels during the course of the experiment. Alpha-fetoprotein (AFP) is a major plasma protein produced by the yolk sac and the liver during fetal life. The protein is thought to be the fetal counterpart of serum albumin, and human AFP and albumin gene are present in tandem in the same transcriptional orientation on chromosome 4. AFP is found in monomeric as well as dimeric and trimeric forms, and binds copper, nickel, fatty acids and bilirubin. AFP levels decrease gradually after birth, reaching adult levels by 8-12 months. Normal adult AFP levels are low, but detectable. AFP has no known function in normal adults and AFP expression in adults is often associated with a subset of tumors such as hepatoma and teratoma. AFP is a tumor marker used to monitor testicular cancer, ovarian cancer, and malignant teratoma. Principle tumors that secrete AFP include endodermal sinus tumor (yolk sac carcinoma), neuroblastoma, hepatoblastoma, and heptocellular carcinoma. In patients with AFP-secreting tumors, serum levels of AFP often correlate with tumor size. Serum levels are useful in assessing response to treatment. Typically, if levels of AFP go down after treatment, the tumor is not growing. A temporary increase in AFP immediately following chemotherapy may indicate not that the tumor is growing but rather that it is shrinking (and releasing AFP as the tumor cells die). Resection is usually associated with a fall in serum levels. As shown in FIG. 14, tumor burden in SNALP-VSP treated animals was significantly reduced.

[0472] The experiment was repeated with SNALP-siRNA treatment at 26, 29, 32 35, 39, and 42 days after implantation. The data is shown in FIG. 13B. The mean survival of SNALP-VSP animals was extended by approximately 15 days versus SNALP-Luc treated animals by approximately 19 days, or 38%.

### Example 8

### Induction of Mono-Asters in Established Tumors

[0473] Inhibition of KSP in dividing cells leads to the formation of mono asters that are readily observable in histological sections. To determine whether mono aster formation occurred in SNALP-VSP treated tumors, tumor bearing animals (three weeks after Hep3B cell implantation) were administered 2 mg/kg SNALP-VSP via tail vein injection. Control animals received 2 mg/kg SNALP-Luc. Each cocktail was formulated into 1:57 cDMA SNALP (1.4% PEG-cDMA; 57.1% DLinDMA; 7.1% DPPC; and 34.3% cholesterol), 6:1 lipid:drug using original citrate buffer conditions.

[0474] Twenty four hours later, animals were sacrificed, and tumor bearing liver lobes were processed for histological analysis. Representative images of H&E stained tissue sections are shown in FIG. 15. Extensive mono aster formation was evident in SNALP-VSP treated (A), but not SNALP-Luc treated (B), tumors. In the latter, normal mitotic figures were evident. The generation of mono asters is a characteristic feature of KSP inhibition and provides further evidence that SNALP-VSP has significant activity in established liver tumors.

### Example 9

### Manufacturing Process and Product Specification of ALN-VSP02 (SNALP-VSP)

[0475] ALN-VSP02 product contains 2 mg/mL of drug substance ALN-VSPDS01 formulated in a sterile lipid particle formulation (referred to as SNALP) for IV administration via infusion. Drug substance ALN-VSPDS01 consists of two siRNAs (ALN-12115 targeting KSP and ALN-3133 targeting VEGF) in an equimolar ratio. The drug product is packaged in 10 mL glass vials with a fill volume of 5 mL.

[0476] The drug substance can be formulated in other nucleic acid-lipid particle formulations as described herein, e.g., with cationic lipids XTC, ALNY-100, and MC3.

[0477] The following terminology is used herein:

| Drug Substance | siRNA Duplexes | Single Strand Intermediates |
|---|---|---|
| ALN-VSPDS01 | ALN-12115* | Sense: A-19562 |
| | | Antisense: A-19563 |
| | ALN-3133** | Sense: A-3981 |
| | | Antisense: A-3982 |

*Alternate names = AD-12115, AD12115;
**Alternate names = AD-3133, ADS3133

[0478] 9.1 Preparation of Drug Substance ALN-VSPDS01

[0479] The two siRNA components of drug substance ALN-VSPDS01, ALN-12115 and ALN-3133, are chemically synthesized using commercially available synthesizers and raw materials. The manufacturing process consists of synthesizing the two single strand oligonucleotides of each duplex (A 19562 sense and A 19563 antisense of ALN 12115 and A 3981 sense and A 3982 antisense of ALN 3133) by conventional solid phase oligonucleotide synthesis using phosphoramidite chemistry and 5′ O dimethoxytriphenylmethyl (DMT) protecting group with the 2′ hydroxyl protected with tert butyldimethylsilyl (TBDMS) or the 2′ hydroxyl replaced with a 2′ methoxy group (2′ OMe). Assembly of an oligonucleotide chain by the phosphoramidite method on a solid support such as controlled pore glass or polystyrene. The cycle consists of 5′ deprotection, coupling, oxidation, and capping. Each coupling reaction is carried out by activation of the appropriately protected ribo, 2′ OMe, or deoxyribonucleoside amidite using 5 (ethylthio) 1H tetrazole reagent followed by the coupling of the free 5′ hydroxyl group of a support immobilized protected nucleoside or oligonucleotide. After the appropriate number of cycles, the final 5′ protecting group is removed by acid treatment. The crude oligonucleotide is cleaved from the solid support by aqueous methylamine treatment with concomitant removal of the cyanoethyl protecting group as well as nucleobase protecting groups. The 2′ O TBDMS group is then cleaved using a hydrogen fluoride containing reagent to yield the crude oligoribonucleotide, which is purified using strong anion exchange high performance liquid chromatography (HPLC) followed by desalting using ultrafiltration. The purified single strands are analyzed to confirm the correct molecular weight, the molecular sequence, impurity profile and oligonucleotide content, prior to annealing into the duplexes. The annealed duplex intermediates ALN 12115 and ALN 3133 are either lyophilized and stored at 20° C. or mixed in 1:1 molar ratio and the solution is lyophilized to yield drug substance ALN VSPDS01. If the duplex intermediates were stored as dry powder, they are re-dissolved in water before mixing. The equimolar ratio is achieved by monitoring the mixing process by an HPLC method.

[0480] Example specifications are shown in Table 16a.

TABLE 16a
Example specifications for ALN-VSPDS01

| Test | Method | Acceptance Criteria |
|---|---|---|
| Appearance | Visual | White to off-white powder |
| Identity, ALN-VSPDS01 | Duplex AX-HPLC | Duplex retention times are consistent |
| ALN-3133 | | with those of reference standards |
| ALN-12115 | | |
| Identity, ALN-VSPDS01 | MS | Molecular weight of single strands are |
| | | within the following ranges: |
| | | A-3981: 6869-6873 Da |
| | | A-3982: 7305-7309 Da |
| | | A-19562: 6762-6766 Da |
| | | A-19563: 6675-6679 Da |
| Sodium counter ion (% w/w on | Flame AAS or ICP-OES | Report data |
| anhydrous basis) | | |
| ALN-VSPDS01 assay | Denaturing AX-HPLC | 90-110% |
| Purity of ALN-VSPDS01 | SEC | ≧90.0 area % |
| Single strand purity, | Denaturing AX-HPLC | Report data |
| ALN-VSPDS01 | | Report area % for total impurities |
| siRNA molar ratio | Duplex AX-HPLC | 1.0 ± 0.1 |
| Moisture content | Karl Fischer titration | ≦15% |
| Residual solvents | HS-Capillary GC | |
| Acetonitrile | | ≦410 ppm |
| Ethanol | | ≦5000 ppm |
| Isopropanol | | ≦5000 ppm |
| pH of 1% solution | USP <791> | Report data |
| Heavy metals | ICP-MS | Report data |
| As, Cd, Cu, Cr, Fe, Ni, Pb, Sn | | |
| Bacterial endotoxins | USP <85> | ≦0.5 EU/mg |
| Bioburden | Modified USP <61> | <100 CFU/g |

[0481] The results of up to 12 month stability testing for ALN-VSPDS01 drug substance are shown in Tables 16b. The assay methods were chosen to assess physical property (appearance, pH, moisture), purity (by SEC and denaturing anion exchange chromatography) and potency (by denaturing anion exchange chromatography [AX-HPLC]).

TABLE 16b
Stability of drug substance

| Lot No.: A05M07001N | | | Study Storage Conditions: −20° C. (Storage Condition) | | | | |
|---|---|---|---|---|---|---|---|
| | | Acceptance | Results | | | | |
| Test | Method | Criteria | Initial | 1 Month | 3 Months | 6 Months | 12 Months |
| Appearance | Visual | White to off- | Pass | Pass | Pass | Pass | Pass |
| | | white powder | | | | | |
| pH | USP <791> | Report data | 6.7 | 6.4 | 6.6 | 6.4 | 6.8 |
| Moisture | Karl Fischer | ≦15% | 3.6* | 6.7 | 6.2 | 5.6 | 5.0 |
| content | titration | | | | | | |
| (% w/w) | | | | | | | |
| Purity (area | SEC | ≧90.0 area % | 95 | 95 | 94 | 92 | 95 |
| %) | | | | | | | |
| A-3981 | Denaturing AX- | Report data | 24 | 23 | 23 | 23 | 23 |
| (sense) | HPLC | | | | | | |
| (area %) | | | | | | | |
| A-3982 | Denaturing AX- | Report data | 23 | 23 | 23 | 23 | 24 |
| (antisense) | HPLC | | | | | | |
| (area %) | | | | | | | |
| A-19562 | Denaturing AX- | Report data | 22 | 21 | 21 | 21 | 21 |
| (sense) | HPLC | | | | | | |
| (area %) | | | | | | | |
| A-19563 | Denaturing AX- | Report data | 23 | 22 | 22 | 22 | 22 |
| (antisense) | HPLC | | | | | | |
| (area %) | | | | | | | |

[0482] 9.2 Preparation of Drug Product ALN-VSP02

[0483] ALN VSP02, is a sterile formulation of the two siRNAs (in a 1:1 molar ratio) with lipid excipients in isotonic buffer. The lipid excipients associate with the two siRNAs, protect them from degradation in the circulatory system, and aid in their delivery to the target tissue. The specific lipid excipients and the quantitative proportion of each (shown in Table 17) have been selected through an iterative series of experiments comparing the physicochemical properties, stability, pharmacodynamics, pharmacokinetics, toxicity and product manufacturability of numerous different formulations. The excipient DLinDMA is a titratable aminolipid that is positively charged at low pH, such as that found in the endosome of mammalian cells, but relatively uncharged at the more neutral pH of whole blood. This feature facilitates the efficient encapsulation of the negatively charged siRNAs at low pH, preventing formation of empty particles, yet allows for adjustment (reduction) of the particle charge by replacing the formulation buffer with a more neutral storage buffer prior to use. Cholesterol and the neutral lipid DPPC are incorporated in order to provide physicochemical stability to the particles. The polyethyleneglycol lipid conjugate PEG2000 C DMA aids drug product stability, and provides optimum circulation time for the proposed use. ALN VSP02 lipid particles have a mean diameter of approximately 80-90 nm with low polydispersity values. At neutral pH, the particles are essentially uncharged, with Zeta Potential values of less than 6 mV. There is no evidence of empty (non loaded) particles based on the manufacturing process.

TABLE 17
Quantitative Composition of ALN-VSP02

| | Proportion |
|---|---|
| Component, grade | (mg/mL) |
| ALN-VSPDS01, cGMP | 2.0* |
| DLinDMA | 7.3 |
| (1,2-Dilinoleyloxy-N,N-dimethyl-3- | |
| aminopropane), cGMP | |
| DPPC (R-1,2-Dipalmitoyl-sn-glycero- | 1.1 |
| 3-phosphocholine), cGMP | |
| Cholesterol, Synthetic, cGMP | 2.8 |
| PEG2000-C-DMA | 0.8 |
| (3-N-[(ω-Methoxy poly(ethylene | |
| glycol) 2000) carbamoyl]-1,2- | |
| dimyristyloxy-propylamine), cGMP | |
| Phosphate Buffered Saline, cGMP | q.s. |

*The 1:1 molar ratio of the two siRNAs in the drug product is maintained throughout the size distribution of the drug product particles.

[0484] Solutions of lipid (in ethanol) and ALN VSPDS01 drug substance (in aqueous buffer) are mixed and diluted to form a colloidal dispersion of siRNA lipid particles with an average particle size of approximately 80-90 nm. This dispersion is then filtered through 0.45/0.2 μm filters, concentrated, and diafiltered by Tangential Flow Filtration. After in process testing and concentration adjustment to 2.0 mg/mL, the product is sterile filtered, aseptically filled into glass vials, stoppered, capped and placed at 5±3° C. The ethanol and all aqueous buffer components are USP grade; all water used is USP Sterile Water For Injection grade.ALN-VSP02.

[0485] A similar method is used to formulate ALN-VSPDS01 in other lipid formulations, e.g., those with cationic lipids XTC, ALNY-100, and MC3.

### Example 10

### In Vitro Efficacy of ALN-VSP02 in Human Cancer Cell Lines

[0486] The efficacy of ALN-VSP02 treatment in human cancer cell lines was determined via measurement of KSP mRNA, VEGF mRNA, and cell viability after treatment. IC50 (nM) values determined for KSP and VEGF in each cell line.

TABLE 19
cell lines

| Cell line tested | ATCC cat number |
|---|---|
| HELA | ATCC Cat N: CCL-2 |
| KB | ATCC Cat N: CCL-17 |
| HEP3B | ATCC Cat N: HB-8064 |
| SKOV-3 | ATCC Cat N: HTB-77 |
| HCT-116 | ATCC Cat N: CCL-247 |
| HT-29 | ATCC Cat N: HTB-38 |
| PC-3 | ATCC Cat N: CRL-1435 |
| A549 | ATCC Cat N: CCL-185 |
| MDA-MB-231 | ATCC Cat N: HTB-26 |

[0487] Cells were plated in 96 well plates in complete media at day 1 to reach a density of 70% on day 2. On day 2 media was replaced with Opti-MEM reduced serum media (Invitrogen Cat N: 11058-021) and cells were transfected with either ALN-VSP02 or control SNALP-Luc with concentration range starting at 1.8 μM down to 10 pM. After 6 hours the media was changed to complete media. Three replicate plates for each cell line for each experiment was done.

[0488] ALN-VSP02 was formulated as described in Table 17.

[0489] Cells were harvested 24 hours after transfection. KSP levels were measured using bDNA; VEGF mRNA levels were measured using human TaqMan assay.

[0490] Viability was measured using Cell Titer Blue reagent (Promega Cat N: G8080) at 48 and/or 72h following manufacturer's recommendations.

[0491] As shown in Table 20, nM concentrations of VSP02 are effective in reducing expression of both KSP and VEGF in multiple human cell lines. Viability of treated cells was not

TABLE 20
Results

| | IC50 (nM) | IC50 (nM) |
|---|---|---|
| Cell line | KSP | VEGF |
| HeLa | 8.79 | 672 |
| SKOV-3 | 142 | 1347 |
| HCT116 | 31.6 | 27.5 |
| Hep3B | 1.3 | 14.5 |
| HT-29 | 262 | ND |
| PC3 | 127 | ND |
| KB | 50.6 | ND |
| A549 | 201 | ND |
| MB231 | 187 | ND |

### Example 11

### Anti-Tumor Efficacy of VSP SNALP vs. Sorafenib in Established Hep3B Intrahepatic Tumors

[0492] The anti-tumor effects of multi-dosing VSP SNALP verses Sorafenib in scid/beige mice bearing established Hep3B intrahepatic tumors was studied. Sorafenib is a small molecule inhibitor of protein kinases approved for treatment of hepatic cellular carcinoma (HCC).

[0493] Tumors were established by intrahepatic seeding in scid/beige mice as described herein. Treatment was initiated 11 days post-seeding. Mice were treated with Sorafenib and a control siRNA-SNALP, Sorafenib and VSP siRNA-SNALP, or VSP siRNA-SNALP only. Control mice were treated with buffers only (DMSO for Sorafenib and PBS for siRNA-SNALP). Sorafenib was administered intraparenterally from Mon to Fri for three weeks, at 15 mg/kg according to body weight for a total of 15 injections. Sorafenib was administered a minimum of 1 hour after SNALP injections. The siRNA-SNALPS were administered intravenously via the lateral tail vein according at 3 mg/kg based on the most recently recorded body weight (10 ml/kg) for 3 weeks (total of 6 doses) on days 1, 4, 7, 10, 14, and 17.

[0494] Each siRNA-SNALP was formulated into 1:57 cDMA SNALP (1.4% PEG-cDMA; 57.1% DLinDMA; 7.1% DPPC; and 34.3% cholesterol), 6:1 lipid:drug using original citrate buffer conditions.

[0495] Mice were euthanized based on an assessment of tumor burden including progressive weight loss and clinical signs including condition, abdominal distension/discoloration and mobility.

[0496] The percent survival data are shown in FIG. 16. Co-administration of VSP siRNA-SNALP with Sorafenib increased survival proportion compared to administration of Sorafenib or VSP siRNA-SNALP alone. VSP siRNA-SNALP increased survival proportion compared to Sorafenib.

### Example 12

### In vitro Efficacy of VSP Using Variants of AD-12115 and AD-3133

[0497] Two sets of duplexes targeted to Eg5/KSP and VEGF were designed and synthesized. Each set included duplexes tiling 10 nucleotides in each direction of the target sites for either AD-12115 and AD-3133.

[0498] Sequences of the target, sense strand, and antisense strand for each duplex are shown in the Table below.

[0499] Each duplex is assayed for inhibition of expression using the assays described herein. The duplexes are administered alone and/or in combination, e.g., an Eg5/KSP dsRNA in combination with a VEGF dsRNA. In some embodiments, the dsRNA are administered in a nucleic-acid lipid particle, e.g., SNALP, formulation as described herein.

TABLE 21
Sequences of dsRNA targeted to VEGF and Eg5/KSP (tiling)

| | | | SEQ | Sense Strand | SEQ |
|---|---|---|---|---|---|
| | target | target sequence | ID | Antisense strand | ID |
| Duplex ID | gene | 5′ to 3′ | NO: | 5′ to 3′ | NO: |
| AD-20447.1 | VEGFA | ACCAAGGCCAGCACAUAGG | 2264 | AccAAGGccAGcAcAuAGGTsT | 2304 |
| | | | | CCuAUGUGCUGGCCUUGGUTsT | 2305 |
| AD-20448.1 | VEGFA | CCAAGGCCAGCACAUAGGA | 2265 | ccAAGGccAGcAcAuAGGATsT | 2306 |
| | | | | UCCuAUGUGCUGGCCUUGGTsT | 2307 |
| AD-20449.1 | VEGFA | CCAAGGCCAGCACAUAGGA | 2266 | ccAAGGccAGcAcAuAGGATsT | 2308 |
| | | | | CUCCuAUGUGCUGGCCUUGTsT | 2309 |
| AD-20450.1 | VEGFA | AAGGCCAGCACAUAGGAGA | 2267 | AAGGccAGcAcAuAGGAGATsT | 2310 |
| | | | | UCUCCuAUGUGCUGGCCUUTsT | 2311 |
| AD-20451.1 | VEGFA | AGGCCAGCACAUAGGAGAG | 2268 | AGGccAGcAcAuAGGAGAGTsT | 2312 |
| | | | | CUCUCCuAUGUGCUGGCCUTsT | 2313 |
| AD-20452.1 | VEGFA | GGCCAGCACAUAGGAGAGA | 2269 | GGccAGcAcAuAGGAGAGATsT | 2314 |
| | | | | UCUCUCCuAUGUGCUGGCCTsT | 2315 |
| AD-20453.1 | VEGFA | GCCAGCACAUAGGAGAGAU | 2270 | GccAGcAcAuAGGAGAGAuTsT | 2316 |
| | | | | AUCUCUCCuAUGUGCUGGCTsT | 2317 |
| AD-20454.1 | VEGFA | CCAGCACAUAGGAGAGAUG | 2271 | ccAGcAcAuAGGAGAGAuGTsT | 2318 |
| | | | | cAUCUCUCCuAUGUGCUGGTsT | 2319 |
| AD-20455.1 | VEGFA | CAGCACAUAGGAGAGAUGA | 2272 | cAGcAcAuAGGAGAGAuGATsT | 2320 |
| | | | | UcAUCUCUCCuAUGUGCUGTsT | 2321 |
| AD-20456.1 | VEGFA | AGCACAUAGGAGAGAUGAG | 2273 | AGcAcAuAGGAGAGAuGAGTsT | 2322 |
| | | | | CUcAUCUCUCCuAUGUGCUTsT | 2323 |
| AD-20457.1 | VEGFA | CACAUAGGAGAGAUGAGCU | 2274 | cAcAuAGGAGAGAuGAGcuTsT | 2324 |
| | | | | AGCUcAUCUCUCCuAUGUGTsT | 2325 |
| AD-20458.1 | VEGFA | ACAUAGGAGAGAUGAGCUU | 2275 | AcAuAGGAGAGAuGAGcuuTsT | 2326 |
| | | | | AAGCUcAUCUCUCCuAUGUTsT | 2327 |
| AD-20459.1 | VEGFA | CAUAGGAGAGAUGAGCUUC | 2276 | cAuAGGAGAGAuGAGcuucTsT | 2328 |
| | | | | GAAGCUcAUCUCUCCuAUGTsT | 2329 |
| AD-20460.1 | VEGFA | AUAGGAGAGAUGAGCUUCC | 2277 | AuAGGAGAGAuGAGcuuccTsT | 2330 |
| | | | | GGAAGCUcAUCUCUCCuAUTsT | 2331 |
| AD-20461.1 | VEGFA | UAGGAGAGAUGAGCUUCCU | 2278 | uAGGAGAGAuGAGcuuccuTsT | 2332 |
| | | | | AGGAAGCUcAUCUCUCCuATsT | 2333 |
| AD-20462.1 | VEGFA | AGGAGAGAUGAGCUUCCUA | 2279 | AGGAGAGAuGAGcuuccuATsT | 2334 |
| | | | | uAGGAAGCUcAUCUCUCCUTsT | 2335 |
| AD-20463.1 | VEGFA | GGAGAGAUGAGCUUCCUAC | 2280 | GGAGAGAuGAGcuuccuAcTsT | 2336 |
| | | | | GuAGGAAGCUcAUCUCUCCTsT | 2337 |
| AD-20464.1 | VEGFA | GAGAGAUGAGCUUCCUACA | 2281 | GAGAGAuGAGcuuccuAcATsT | 2338 |
| | | | | UGuAGGAAGCUcAUCUCUCTsT | 2339 |
| AD-20465.1 | VEGFA | AGAGAUGAGCUUCCUACAG | 2282 | AGAGAuGAGcuuccuAcAGTsT | 2340 |
| | | | | CUGuAGGAAGCUcAUCUCUTsT | 2341 |
| AD-20466.1 | VEGFA | GAGAUGAGCUUCCUACAGC | 2283 | GAGAuGAGcuuccuAcAGcTsT | 2342 |
| | | | | GCUGuAGGAAGCUcAUCUCTsT | 2343 |
| AD-20467.1 | KSP | AUGUUCCUUAUCGAGAAUC | 2284 | AuGuuccuuAucGAGAAucTsT | 2344 |
| | | | | GAUUCUCGAuAAGGAAcAUTsT | 2345 |
| AD-20468.1 | KSP | UGUUCCUUAUCGAGAAUCU | 2285 | uGuuccuuAucGAGAAucuTsT | 2346 |
| | | | | AGAUUCUCGAuAAGGAAcATsT | 2347 |
| AD-20469.1 | KSP | GUUCCUUAUCGAGAAUCUA | 2286 | GuuccuuAucGAGAAucuATsT | 2348 |
| | | | | uAGAUUCUCGAuAAGGAACTsT | 2349 |
| AD-20470.1 | KSP | UUCCUUAUCGAGAAUCUAA | 2287 | uuccuuAucGAGAAucuAATsT | 2350 |
| | | | | UuAGAUUCUCGAuAAGGAATsT | 2351 |
| AD-20471.1 | KSP | UCCUUAUCGAGAAUCUAAA | 2288 | uccuuAucGAGAAucuAAATsT | 2352 |
| | | | | UUuAGAUUCUCGAuAAGGATsT | 2353 |
| AD-20472.1 | KSP | CCUUAUCGAGAAUCUAAAC | 2289 | ccuuAucGAGAAucuAAAcTsT | 2354 |
| | | | | GUUuAGAUUCUCGAuAAGGTsT | 2355 |
| AD-20473.1 | KSP | CUUAUCGAGAAUCUAAACU | 2290 | cuuAucGAGAAucuAAAcuTsT | 2356 |
| | | | | AGUUuAGAUUCUCGAuAAGTsT | 2357 |
| AD-20474.1 | KSP | UUAUCGAGAAUCUAAACUA | 2291 | uuAucGAGAAucuAAAcuATsT | 2358 |
| | | | | uAGUUuAGAUUCUCGAuAATsT | 2359 |
| AD-20475.1 | KSP | UAUCGAGAAUCUAAACUAA | 2292 | uAucGAGAAucuAAAcuAATsT | 2360 |
| | | | | UuAGUUuAGAUUCUCGAuATsT | 2361 |
| AD-20476.1 | KSP | AUCGAGAAUCUAAACUAAC | 2293 | AucGAGAAucuAAAcuAAcTsT | 2362 |
| | | | | GUuAGUUuAGAUUCUCGAUTsT | 2363 |
| AD-20477.1 | KSP | CGAGAAUCUAAACUAACUA | 2294 | cGAGAAucuAAAcuAAcuATsT | 2364 |
| | | | | | 2365 |
| AD-20478.1 | KSP | GAGAAUCUAAACUAACUAG | 2295 | GAGAAucuAAAcuAAcuAGTsT | 2366 |
| | | | | CuAGUuAGUUuAGAUUCUCTsT | 2367 |
| AD-20479.1 | KSP | AGAAUCUAAACUAACUAGA | 2296 | AGAAucuAAAcuAAcuAGATsT | 2368 |
| | | | | UCuAGUuAGUUuAGAUUCUTsT | 2369 |
| AD-20480.1 | KSP | GAAUCUAAACUAACUAGAA | 2297 | GAAucuAAAcuAAcuAGAATsT | 2370 |
| | | | | UUCuAGUuAGUUuAGAUUCTsT | 2371 |
| AD-20481.1 | KSP | AAUCUAAACUAACUAGAAU | 2298 | AAucuAAAcuAAcuAGAAuTsT | 2372 |
| | | | | AUUCuAGUuAGUUuAGAUUTsT | 2373 |
| AD-20482.1 | KSP | AUCUAAACUAACUAGAAUC | 2299 | AucuAAAcuAAcuAGAAucTsT | 2374 |
| | | | | GAUUCuAGUuAGUUuAGAUTsT | 2375 |
| AD-20483.1 | KSP | UCUAAACUAACUAGAAUCC | 2300 | ucuAAAcuAAcuAGAAuccTsT | 2376 |
| | | | | GGAUUCuAGUuAGUUuAGATsT | 2377 |
| AD-20484.1 | KSP | CUAAACUAACUAGAAUCCU | 2301 | cuAAAcuAAcuAGAAuccuTsT | 2378 |
| | | | | AGGAUUCuAGUuAGUUuAGTsT | 2379 |
| AD-20485.1 | KSP | UAAACUAACUAGAAUCCUC | 2302 | uAAAcuAAcuAGAAuccucTsT | 2380 |
| | | | | GAGGAUUCuAGUuAGUUuATsT | 2381 |
| AD-20486.1 | KSP | AAACUAACUAGAAUCCUCC | 2303 | AAAcuAAcuAGAAuccuccTsT | 2382 |
| | | | | GGAGGAUUCuAGUuAGUUUTsT | 2383 |

### Example 13

### VEGF Targeted dsRNA with a Single Blunt End

[0500] A set of dsRNA duplexes targeted to VEGF were designed and synthesized. The set included duplexes tiling 10 nucleotides in each direction of the target sites for AD-3133. Each duplex includes a 2 base overhang at the end corresponding to the 3′ end of the antisense strand and no overhang, e.g., a blunt end, at the end corresponding to the 5′ end of the antisense strand.

[0501] The sequences of each strand of these duplexes are shown in the following table.

[0502] Each duplex is assayed for inhibition of expression using the assays described herein. The VEGF duplexes are administered alone and/or in combination with an Eg5/KSP dsRNA (e.g., AD-12115). In some embodiments, the dsRNA are administered in a nucleic-acid lipid particle, e.g., SNALP, formulation as described herein.

TABLE 22
Target sequences of blunt ended dsRNA targeted
to VEGF

| | SEQ ID | VEGF target sequence | position on |
|---|---|---|---|
| duplex ID | NO: | 5′ to 3′ | VEGF gene |
| AD-20447.1 | 2384 | ACCAAGGCCAGCACAUAGG | 1365 |
| AD-20448.1 | 2385 | CCAAGGCCAGCACAUAGGA | 1366 |
| AD-20449.1 | 2386 | CAAGGCCAGCACAUAGGAG | 1367 |
| AD-20450.1 | 2387 | AAGGCCAGCACAUAGGAGA | 1368 |
| AD-20451.1 | 2388 | AGGCCAGCACAUAGGAGAG | 1369 |
| AD-20452.1 | 2389 | GGCCAGCACAUAGGAGAGA | 1370 |
| AD-20453.1 | 2390 | GCCAGCACAUAGGAGAGAU | 1371 |
| AD-20454.1 | 2391 | CCAGCACAUAGGAGAGAUG | 1372 |
| AD-20455.1 | 2392 | CAGCACAUAGGAGAGAUGA | 1373 |
| AD-20456.1 | 2393 | AGCACAUAGGAGAGAUGAG | 1374 |
| AD-20457.1 | 2394 | CACAUAGGAGAGAUGAGCU | 1376 |
| AD-20458.1 | 2395 | ACAUAGGAGAGAUGAGCUU | 1377 |
| AD-20459.1 | 2396 | CAUAGGAGAGAUGAGCUUC | 1378 |
| AD-20460.1 | 2397 | AUAGGAGAGAUGAGCUUCC | 1379 |
| AD-20461.1 | 2398 | UAGGAGAGAUGAGCUUCCU | 1380 |
| AD-20462.1 | 2399 | AGGAGAGAUGAGCUUCCUA | 1381 |
| AD-20463.1 | 2400 | GGAGAGAUGAGCUUCCUAC | 1382 |
| AD-20464.1 | 2401 | GAGAGAUGAGCUUCCUACA | 1383 |
| AD-20465.1 | 2402 | AGAGAUGAGCUUCCUACAG | 1384 |
| AD-20466.1 | 2403 | GAGAUGAGCUUCCUACAGC | 1385 |

TABLE 23
Strand sequences of blunt ended dsRNA targeted to VEGF

| | | SEQ | | SEQ |
|---|---|---|---|---|
| | Sense strand | ID | Antisense strand | ID |
| duplex ID | (5′ to 3′) | NO: | (5′ to 3′) | NO: |
| AD-20447.1 | ACCAAGGCCAGCACAUAGGAG | 2404 | CUCCUAUGUGCUGGCCUUGGUGA | 2424 |
| AD-20448.1 | CCAAGGCCAGCACAUAGGAGA | 2405 | UCUCCUAUGUGCUGGCCUUGGUG | 2425 |
| AD-20449.1 | CAAGGCCAGCACAUAGGAGAG | 2406 | CUCUCCUAUGUGCUGGCCUUGGU | 2426 |
| AD-20450.1 | AAGGCCAGCACAUAGGAGAGA | 2407 | UCUCUCCUAUGUGCUGGCCUUGG | 2427 |
| AD-20451.1 | AGGCCAGCACAUAGGAGAGAU | 2408 | AUCUCUCCUAUGUGCUGGCCUUG | 2428 |
| AD-20452.1 | GGCCAGCACAUAGGAGAGAUG | 2409 | CAUCUCUCCUAUGUGCUGGCCUU | 2429 |
| AD-20453.1 | GCCAGCACAUAGGAGAGAUGA | 2410 | UCAUCUCUCCUAUGUGCUGGCCU | 2430 |
| AD-20454.1 | CCAGCACAUAGGAGAGAUGAG | 2411 | CUCAUCUCUCCUAUGUGCUGGCC | 2431 |
| AD-20455.1 | CAGCACAUAGGAGAGAUGAGC | 2412 | GCUCAUCUCUCCUAUGUGCUGGC | 2432 |
| AD-20456.1 | AGCACAUAGGAGAGAUGAGCU | 2413 | AGCUCAUCUCUCCUAUGUGCUGG | 2433 |
| AD-20457.1 | CACAUAGGAGAGAUGAGCUUC | 2414 | GAAGCUCAUCUCUCCUAUGUGCU | 2434 |
| AD-20458.1 | ACAUAGGAGAGAUGAGCUUCC | 2415 | GGAAGCUCAUCUCUCCUAUGUGC | 2435 |
| AD-20459.1 | CAUAGGAGAGAUGAGCUUCCU | 2416 | AGGAAGCUCAUCUCUCCUAUGUG | 2436 |
| AD-20460.1 | AUAGGAGAGAUGAGCUUCCUA | 2417 | UAGGAAGCUCAUCUCUCCUAUGU | 2437 |
| AD-20461.1 | UAGGAGAGAUGAGCUUCCUAC | 2418 | GUAGGAAGCUCAUCUCUCCUAUG | 2438 |
| AD-20462.1 | AGGAGAGAUGAGCUUCCUACA | 2419 | UGUAGGAAGCUCAUCUCUCCUAU | 2439 |
| AD-20463.1 | GGAGAGAUGAGCUUCCUACAG | 2420 | CUGUAGGAAGCUCAUCUCUCCUA | 2440 |
| AD-20464.1 | GAGAGAUGAGCUUCCUACAGC | 2421 | GCUGUAGGAAGCUCAUCUCUCCU | 2441 |
| AD-20465.1 | AGAGAUGAGCUUCCUACAGCA | 2422 | UGCUGUAGGAAGCUCAUCUCUCC | 2442 |
| AD-20466.1 | GAGAUGAGCUUCCUACAGCAC | 2423 | GUGCUGUAGGAAGCUCAUCUCUC | 2443 |

### Example 14

### dsRNA Oligonucleotide Synthesis

[0503] Synthesis

[0504] All oligonucleotides are synthesized on an AKTAoligopilot synthesizer. Commercially available controlled pore glass solid support (dT-CPG, 500 \acute{Å}, Prime Synthesis) and RNA phosphoramidites with standard protecting groups, 5′-O-dimethoxytrityl N6-benzoyl-2′-t-butyldimethylsilyl-adenosine-3′-O—N,N′-diisopropyl-2-cyanoethylphosphoramidite, 5′-O-dimethoxytrityl-N4-acetyl-2′-t-butyldimethylsilyl-cytidine-3′-O—N,N′-diisopropy1-2-cyanoethylphosphoramidite, 5′-O-dimethoxytrityl-N2-isobutryl-2′-t-butyldimethylsilyl-guanosine-3′-O—N,N′-diisopropyl-2-cyanoethylphosphoramidite, and 5′-O-dimethoxytrityl-2′-t-butyldimethylsilyl-uridine-3′-O—N,N′-diisopropyl-2-cyanoethylphosphoramidite (Pierce Nucleic Acids Technologies) were used for the oligonucleotide synthesis. The 2′-F phosphoramidites, 5′-O-dimethoxytrityl-N4-acetyl-2′-fluro-cytidine-3′-O—N,N′-diisopropyl-2-cyanoethyl-phosphoramidite and 5′-O-dimethoxytrityl-2′-fluro-uridine-3′-O—N,N′-diisopropyl-2-cyanoethyl-phosphoramidite are purchased from (Promega). All phosphoramidites are used at a concentration of 0.2M in acetonitrile (CH₃CN) except for guanosine which is used at 0.2M concentration in 10% THF/ANC (v/v). Coupling/recycling time of 16 minutes is used. The activator is 5-ethyl thiotetrazole (0.75M, American International Chemicals); for the PO-oxidatioin iodine/water/pyridine is used and for the PS-oxidation PADS (2%) in 2,6-lutidine/ACN (1:1 v/v) is used.

[0505] 3′-ligand conjugated strands are synthesized using solid support containing the corresponding ligand. For example, the introduction of cholesterol unit in the sequence is performed from a hydroxyprolinol-cholesterol phosphoramidite. Cholesterol is tethered to trans-4-hydroxyprolinol via a 6-aminohexanoate linkage to obtain a hydroxyprolinol-cholesterol moiety. 5′-end Cy-3 and Cy-5.5 (fluorophore) labeled siRNAs are synthesized from the corresponding Quasar-570 (Cy-3) phosphoramidite are purchased from Biosearch Technologies. Conjugation of ligands to 5′-end and or internal position is achieved by using appropriately protected ligand-phosphoramidite building block. An extended 15 min coupling of 0.1 M solution of phosphoramidite in anhydrous CH3CN in the presence of 5-(ethylthio)-1H-tetrazole activator to a solid-support-bound oligonucleotide. Oxidation of the internucleotide phosphite to the phosphate is carried out using standard iodine-water as reported (1) or by treatment with tert-butyl hydroperoxide/acetonitrile/water (10:87:3) with 10 min oxidation wait time conjugated oligonucleotide. Phosphorothioate is introduced by the oxidation of phosphite to phosphorothioate by using a sulfur transfer reagent such as DDTT (purchased from AM Chemicals), PADS and or Beaucage reagent. The cholesterol phosphoramidite is synthesized in house and used at a concentration of 0.1 M in dichloromethane. Coupling time for the cholesterol phosphoramidite is 16 minutes.

[0506] Deprotection I (Nucleobase Deprotection)

[0507] After completion of synthesis, the support is transferred to a 100 mL glass bottle (VWR). The oligonucleotide is cleaved from the support with simultaneous deprotection of base and phosphate groups with 80 mL of a mixture of ethanolic ammonia [ammonia: ethanol (3:1)] for 6.5 h at 55° C. The bottle is cooled briefly on ice and then the ethanolic ammonia mixture is filtered into a new 250-mL bottle. The CPG is washed with 2×40 mL portions of ethanol/water (1:1 v/v). The volume of the mixture is then reduced to ˜30 mL by roto-vap. The mixture is then frozen on dry ice and dried under vacuum on a speed vac.

[0508] Deprotection II (Removal of 2′-TBDMS Group)

[0509] The dried residue is resuspended in 26 mL of triethylamine, triethylamine trihydrofluoride (TEA.3HF) or pyridine-HF and DMSO (3:4:6) and heated at 60° C. for 90 minutes to remove the tert-butyldimethylsilyl (TBDMS) groups at the 2′ position. The reaction is then quenched with 50 mL of 20 mM sodium acetate and the pH is adjusted to 6.5. Oligonucleotide is stored in a freezer until purification.

[0510] Analysis

[0511] The oligonucleotides are analyzed by high-performance liquid chromatography (HPLC) prior to purification and selection of buffer and column depends on nature of the sequence and or conjugated ligand.

[0512] HPLC Purification

[0513] The ligand-conjugated oligonucleotides are purified by reverse-phase preparative HPLC. The unconjugated oligonucleotides are purified by anion-exchange HPLC on a TSK gel column packed in house. The buffers are 20 mM sodium phosphate (pH 8.5) in 10% CH₃CN (buffer A) and 20 mM sodium phosphate (pH 8.5) in 10% CH₃CN, 1M NaBr (buffer B). Fractions containing full-length oligonucleotides are pooled, desalted, and lyophilized. Approximately 0.15 OD of desalted oligonucleotides are diluted in water to 150 μL and then pipetted into special vials for CGE and LC/MS analysis. Compounds are then analyzed by LC-ESMS and CGE.

[0514] siRNA Preparation

[0515] For the preparation of siRNA, equimolar amounts of sense and antisense strand are heated in 1× PBS at 95° C. for 5 min and slowly cooled to room temperature. Integrity of the duplex is confirmed by HPLC analysis. AD-3133 and AD-AD-12115, described herein are synthesized.

### Example 15

### Synthesis of Collimated Lipids

[0516] The PEG-lipids, such as mPEG2000-1,2-Di-O-alkyl-sn3-carbomoylglyceride (PEG-DMG) were synthesized using the following procedures:

[chemical structure]

[0517] mPEG2000-1,2-Di-O-alkyl-sn3-carbomoylglyceride

[0518] Preparation of compound 4a: 1,2-Di-O-tetradecyl-sn-glyceride 1a (30 g, 61.80 mmol) and N,N′-succinimidylcarboante (DSC, 23.76 g, 1.5 eq) were taken in dichloromethane (DCM, 500 mL) and stirred over an ice water mixture. Triethylamine (25.30 mL, 3 eq) was added to stirring solution and subsequently the reaction mixture was allowed to stir overnight at ambient temperature. Progress of the reaction was monitored by TLC. The reaction mixture was diluted with DCM (400 mL) and the organic layer was washed with water (2×500 mL), aqueous NaHCO₃ solution (500 mL) followed by standard work-up. Residue obtained was dried at ambient temperature under high vacuum overnight. After drying the crude carbonate 2a thus obtained was dissolved in dichloromethane (500 mL) and stirred over an ice bath. To the stirring solution mPEG₂₀₀₀-NH₂ (3, 103.00 g, 47.20 mmol, purchased from NOF Corporation, Japan) and anhydrous pyridine (80 mL, excess) were added under argon. In some embodiments, the methoxy-(PEG)x-amine has an x=from 45-49, preferably 47-49, and more preferably 49. The reaction mixture was then allowed stir at ambient temperature overnight. Solvents and volatiles were removed under vacuum and the residue was dissolved in DCM (200 mL) and charged on a column of silica gel packed in ethyl acetate. The column was initially eluted with ethyl acetate and subsequently with gradient of 5-10% methanol in dichloromethane to afford the desired PEG-Lipid 4a as a white solid (105.30 g, 83%). ¹H NMR (CDCl₃, 400 MHz) δ=5.20-5.12(m, 1H), 4.18-4.01(m, 2H), 3.80-3.70(m, 2H), 3.70-3.20(m, —O—CH₂—CH₂—O—, PEG-CH₂), 2.10-2.01(m, 2H), 1.70-1.60 (m, 2H), 1.56-1.45(m, 4H), 1.31-1.15(m, 48H), 0.84(t, J=6.5 Hz, 6H). MS range found: 2660-2836.

[0519] Preparation of 4b: 1,2-Di-O-hexadecyl-sn-glyceride 1b (1.00 g, 1.848 mmol) and DSC (0.710 g, 1.5 eq) were taken together in dichloromethane (20 mL) and cooled down to 0° C. in an ice water mixture. Triethylamine (1.00 mL, 3 eq) was added to that and stirred overnight. The reaction was followed by TLC, diluted with DCM, washed with water (2 times), NaHCO₃ solution and dried over sodium sulfate. Solvents were removed under reduced pressure and the residue 2b under high vacuum overnight. This compound was directly used for the next reaction without further purification. MPEG₂₀₀₀-NH₂ 3 (1.50 g, 0.687 mmol, purchased from NOF Corporation, Japan) and compound from previous step 2b (0.702 g, 1.5 eq) were dissolved in dichloromethane (20 mL) under argon. The reaction was cooled to 0° C. Pyridine (1 mL, excess) was added to that and stirred overnight. The reaction was monitored by TLC. Solvents and volatiles were removed under vacuum and the residue was purified by chromatography (first Ethyl acetate then 5-10% MeOH/DCM as a gradient elution) to get the required compound 4b as white solid (1.46 g, 76%). ¹H NMR (CDCl₃, 400 MHz) δ=5.17(t, J=5.5 Hz, 1H), 4.13(dd, J=4.00 Hz, 11.00 Hz, 1H), 4.05(dd, J=5.00Hz, 11.00 Hz, 1H), 3.82-3.75(m, 2H), 3.70-3.20(m, —O—CH₂—CH₂—O—, PEG-CH₂), 2.05-1.90(m, 2H), 1.80-1.70 (m, 2H), 1.61-1.45(m, 6H), 1.35-1.17(m, 56H), 0.85(t, J=6.5 Hz, 6H). MS range found: 2716-2892.

[0520] Preparation of 4c: 1,2-Di-O-octadecyl-sn-glyceride 1c (4.00 g, 6.70 mmol) and DSC (2.58 g, 1.5 eq) were taken together in dichloromethane (60 mL) and cooled down to 0° C. in an ice water mixture. Triethylamine (2.75 mL, 3 eq) was added to that and stirred overnight. The reaction was followed by TLC, diluted with DCM, washed with water (2 times), NaHCO₃ solution and dried over sodium sulfate. Solvents were removed under reduced pressure and the residue under high vacuum overnight. This compound was directly used for the next reaction with further purification. MPEG₂₀₀₀-NH₂ 3 (1.50 g, 0.687 mmol, purchased from NOF Corporation, Japan) and compound from previous step 2c (0.760 g, 1.5 eq) were dissolved in dichloromethane (20 mL) under argon. The reaction was cooled to 0° C. Pyridine (1 mL, excess) was added to that and stirred overnight. The reaction was monitored by TLC. Solvents and volatiles were removed under vacuum and the residue was purified by chromatography (first Ethyl acetate then 5-10% MeOH/DCM as a gradient elution) to get the required compound 4c as white solid (0.92 g, 48%). ¹H NMR (CDCl₃, 400 MHz) δ=5.22-5.15(m, 1H), 4.16(dd, J=4.00Hz, 11.00 Hz, 1H), 4.06 (dd, J=5.00 Hz, 11.00 Hz, 1H), 3.81-3.75(m, 2H), 3.70-3.20(m, —O—CH₂—CH₂—O—, PEG-CH₂), 1.80-1.70 (m, 2H), 1.60-1.48(m, 4H), 1.31-1.15(m, 64H), 0.85(t, J=6.5 Hz, 6H). MS range found: 2774-2948.

### Example 16

### General Protocol for the Extrusion Method

[0521] Lipids (e.g., Lipid A, DSPC, cholesterol, DMG-PEG) are solubilized and mixed in ethanol according to the desired molar ratio. Liposomes are formed by an ethanol injection method where mixed lipids are added to sodium acetate buffer at pH 5.2. This results in the spontaneous formation of liposomes in 35% ethanol. The liposomes are extruded through a 0.08 μm polycarbonate membrane at least 2 times. A stock siRNA solution is prepared in sodium acetate and 35% ethanol and is added to the liposome to load. The siRNA-liposome solution is incubated at 37° C. for 30 min and, subsequently, diluted. Ethanol is removed and exchanged to PBS buffer by dialysis or tangential flow filtration.

### Example 17

### General Protocol for the In-Line Mixing Method

[0522] Individual and separate stock solutions are prepared—one containing lipid and the other siRNA. Lipid stock containing, e.g., lipid A, DSPC, cholesterol and PEG lipid is prepared by solubilized in 90% ethanol. The remaining 10% is low pH citrate buffer. The concentration of the lipid stock is 4 mg/mL. The pH of this citrate buffer can range between pH 3-5, depending on the type of fusogenic lipid employed. The siRNA is also solubilized in citrate buffer at a concentration of 4 mg/mL. For small scale, 5 mL of each stock solution is prepared.

[0523] Stock solutions are completely clear and lipids must be completely solubilized before combining with siRNA. Therefore stock solutions may be heated to completely solubilize the lipids. The siRNAs used in the process may be unmodified oligonucleotides or modified and may be conjugated with lipophilic moieties such as cholesterol.

[0524] The individual stocks are combined by pumping each solution to a T-junction. A dual-head Watson-Marlow pump is used to simultaneously control the start and stop of the two streams. A 1.6 mm polypropylene tubing is further downsized to a 0.8 mm tubing in order to increase the linear flow rate. The polypropylene line (ID=0.8 mm) are attached to either side of a T-junction. The polypropylene T has a linear edge of 1.6 mm for a resultant volume of 4.1 mm³. Each of the large ends (1.6 mm) of polypropylene line is placed into test tubes containing either solubilized lipid stock or solubilized siRNA. After the T-junction a single tubing is placed where the combined stream will emit. The tubing is then extending into a container with 2× volume of PBS. The PBS is rapidly stirring. The flow rate for the pump is at a setting of 300 rpm or 110 mL/min. Ethanol is removed and exchanged for PBS by dialysis. The lipid formulations are then concentrated using centrifugation or diafiltration to an appropriate working concentration.

[0525] FIG. 17 shows a schematic of the in-line mixing method.

### Example 18

### siRNA Silencing by LNP-08 Formulated VSP in Intrahepatic Hep3B Tumors in Mice

[0526] Silencing of VSP (VEGF and KSP) was performed in orthotopic (intrahepatic) Hep3B tumors following intravenous administration of siRNAs formulated in XTC containing nucleic acid-lipid particles, e.g., LNP-08.

[0527] Tumors were established by implantation of 1×10⁶ Hep3B cells into the right flank of 8 week-old female Fox scid/beige mice. The cells were engineered to stably express firefly Luciferase. Tumor burden was monitored weekly by in vivo biophotonic imaging using the IVIS system (Caliper, Inc.). Approximately 4 weeks after tumor implantation, cohorts of tumor-bearing animals received intravenous (tail vein) injections of test article as follows:

| Group | Test article | Dose (siRNA) | n |
|---|---|---|---|
| 1 | LNP08-1955 | 4 mg/kg | 5 |
| 2 | LNP08-VSP | 4 mg/kg | 5 |

[0528] LNP08-1955 is siRNA AD-1955 (targeting firefly Luciferase) formulated in lipid nanoparticles comprising XTC (60 mol %), DSPC (7.5 mol %), Cholesterol (31 mol %) and PEG-cDMG (1.5 mol %) at an N:P ratio of approximately 3.0.

[0529] LNP08-VSP is siRNAs AD-12115 (targeting KSP) and AD-3133 (targeting VEGF) in a 1:1 molar ratio formulated in lipid nanoparticles comprising XTC (60 mol %), DSPC (7.5 mol %), Cholesterol (31 mol %) and PEG-cDMG (1.5 mol %) at an N:P ratio of approximately 3.0.

[0530] One day following treatment, animals were sacrificed and tumor-bearing liver lobes collected for analysis. Total RNA was extracted followed by cDNA synthesis by random priming. Levels of human KSP and human VEGF, normalized to human GAPDH, were measured using human-specific custom Taqman® assays (Applied Biosystems, Inc.). Group averages were calculated and normalized to the LNP08-1955 treatment group.

[0531] As shown in FIG. 18, treatment with LNP08-VSP (Group 2) resulted in a greater than 60%, e.g., 68% reduction in tumor KSP mRNA (p<0.001) and at least 40% reduction in VEGF mRNA (p<0.05) relative to the LNP08-1955 treatment (Group 1).

### Example 19

### Evaluation of LNP-011 and LNP-012 Lipid Formulations in the Mouse Hep3b Tumor Model

[0532] The effects of various VSP formulations on KSP and VEGF expression in intrahepatic Hep3B tumors in mice were compared. Thirty five female Fox Scid beige mice were injected with 1×10̂6 Hep3B-Luc cells suspeneded in 0.025 cc PBS via direct intrahepatic surgery. Tumor growth was monitered via Luc readings by Xenogen.

[0533] Mice received a single bolus dose (4 mg/kg) of one of the following: SNALP-1955 (luciferase control); ALN-VSP02; SNALP-T-VSP (with C-18 PEG)-VSP; LNP-11-VSP, and LNP-12 VSP. Animal were euthanized at 24 hours post does, and the TaqMan protocol was used for detection of tumor specific KSP and VEGF knockdown.

[0534] The results are shown in FIG. 21. SNAPL-T-VSP; LNP-11-VSP, and LNP-12 VSP demonstrated increased knockdown of KSP expression compared to ALN-VSP02.

### Example 20

### Evaluation of LNP-08 +/−C18 Lipid Formulations in the Mouse Hep3b Tumor Model

[0535] The effects of the following VSP formulations were tested in a HEP3B tumor model. Tumor-bearing (intrahepatic) mice were injected with one of the following formulations, prepared and administered as a single bolus IV dose according to protocols described above:

| Group | Test article | Dose (siRNA) | | n |
|---|---|---|---|---|
| 1 | ALN-VSP02 | 4 | mg/kg | 6 |
| 2 | LNPOS-Luc | 4 | mg/kg | 4 |
| 3 | LNP08-VSP | 4 | mg/kg | 7 |
| 4 | LNP08-VSP | 1 | mg/kg | 7 |
| 5 | LNP08-VSP | 0.25 | mg/kg | 7 |
| 6 | LNP08-C18-VSP | 4 | mg/kg | 7 |
| 7 | LNP08-C18-VSP | 1 | mg/kg | 7 |
| 8 | LNP08-C18-VSP | 0.25 | mg/kg | 7 |

[0536] Formulation of ALN-VSP02 was as described in Example 9.

[0537] LNP08-Luc is siRNA AD-1955 (targeting firefly Luciferase) formulated in lipid nanoparticles comprising XTC (60 mol %), DSPC (7.5 mol %), Cholesterol (31 mol %) and PEG-cDMG (1.5 mol %) at an N:P ratio of approximately 3.0.

[0538] LNP08-VSP is siRNA AD-12115 (targeting KSP) and AD-3133 (targeting VEGF) in a 1:1 molar ratio formulated in lipid nanoparticles comprising XTC (60 mol %), DSPC (7.5 mol %), Cholesterol (31 mol %) and PEG-cDMG (1.5 mol %) at an N:P ratio of approximately 3.0.

[0539] LNP08-C18-VSP is siRNA AD-12115 (targeting KSP) and AD-3133 (targeting VEGF) in a 1:1 molar ratio formulated in lipid nanoparticles comprising XTC (60 mol %), DSPC (7.5 mol %), Cholesterol (31 mol %) and PEG-cDSG (1.5 mol %) at an N:P ratio of approximately 3.0.

[0540] FIG. 19 illustrates the chemical structures of PEG-DSG and PEG-C-DSA. PEG-DSG is polyethylene glycol distyryl glycerol, in which PEG is either C18-PEG or PEG-C18 and the PEG has an average molecular weight of 2000 Da.

[0541] Twenty-four hours following treatment, animals were sacrificed and tumors collected for analysis. Total RNA was extracted from tumors, followed by cDNA synthesis by random priming. Levels of human KSP and human VEGF, normalized to human GAPDH, were measured using human-specific custom Taqman® assays (Applied Biosystems, Inc.).

[0542] The results are shown the graphs in FIG. 22 and show KSP and VEGF silencing comparable to silencing by ALN-VSP02.

### Example 21

### Role of ApoE in the Cellular Uptake of Liposomes in HeLa Cells

[0543] LNP formulated dsRNAs are prepared with the addition of recombinant human ApoE. The resulting LNP-ApoE formulated dsRNA are tested in HeLa cells for the effect on uptake of the dsRNA by the cells. Compositions and methods utilizing ApoE in conjunction with ionizable lipids is described in International patent application No., PCT/US10/22614, which is herein incorporated by reference in its entirety.

[0544] Experimental Protocol:

[0545] HeLa cells are seeded in 96 well plates (Grenier) at 6000 cells per well overnight. Three different liposome formulations of Alexa-fluor 647 labeled GFP siRNA: 1) LNP01, 2) SNALP, 3) LNP05 are diluted in one of 3 media conditions to a 50 nM final concentration. Media conditions examined are OptiMem, DMEM with 10% FBS or DMEM with 10% FBS plus 10 ug/mL of human recombinant ApoE (Fitzgerald Industries). The indicated liposomes either in media or in media-precomplexed with ApoE for 10 minutes are added to cells for either 4, 6, or 24 hours. Three replicated are performed for each experimental condition. After addition to HeLa cells in plates for indicated time points cells are fixed in 4% paraformaldehyde for 15 minutes then nuclei and cytoplasm stained with DAPI and Syto dye. Images are acquired using an Opera spinning disc automated confocal system from Perkin Elmer. Quantitation of Alexa Fluor 647 siRNA uptake is performed using Acapella software. Four different parameters are quantified: 1) Cell number, 2) the number of siRNA positive spots per field, 3) the number of siRNA positive spots per cell and 4) the integrated spot signal or the average number of siRNA spots per cell times the average spot intensity. The average spot signal therefore is a rough estimate of the total amount of siRNA content per cell.

[0546] In addition, the 4 different LNP-ApoE formulated dsRNA are tested (SNALP (DLinDMa), XTC, MC3, ALNY-100) in the following cell lines and the effect on uptake of the dsRNA by the cells is determined:

[0547] A375 (melanoma), B16F10 (melanoma), BT-474 (breast), GTL-16 (gastric carcinoma), Hct116 (colon), Hep3b (Hepatic), HepG2 (liver), HeLa (cervical), HUH 7 (liver), MCF7 (breast), Mel-285 (uveal melanoma), NCI-H1975 (lung), OMM-1.3 (uveal melanoma), PC3 (prostate), SKOV-3 (ovarian), U87 (glioblastoma).

### Example 22

### K_{d} of KSP siRNA in the Presence of ApoE

[0548] The effect of ApoE on the Kd (affinity) of LNP-08 formulated siRNA targeting KSP was evaluated in multiple cell lines. Both LNP08 and LNP08 with C18PEG formulated siRNA were used. The KSP targeted siRNA duplex was AL-DP-6248.

| position in | | | | | |
|---|---|---|---|---|---|
| human | SEQ | | SEQ | | |
| Eg5/KSP | ID | | ID | antisense sequence | duplex |
| sequence | NO: | sense sequence (5′-3′) | No: | (5′-3′) | name |
| 383-405 | 45 | AccGAAGuGuuGuuuGuccTsT | 46 | GGAcAAAcAAcACUUCGGUTsT | AL-DP- |
| | | | | | 6248 |

The following cell lines were used.

| Cell Line | Cell Type | Species |
|---|---|---|
| HeLa | Cervical Adenocarcinoma | Human |
| HCT116 | Colorectal carcinoma | Human |
| A375 | Melanoma | Human |
| MCF7 | Breast adenocarcinoma | Human |
| B16F10 | Melanoma | Mouse |
| Hep3b | Hepatic | Human |
| HUH 7 | Hepatic | Human |
| HepG2 | Hepatic | Human |
| Skov 3 | Ovarian | Human |
| U87 | Glioblastoma | Human |
| PC3 | Prostate | Human |

[0549] On day 1, cells were plated in 96 well plates at 20,000 cells/well. On day 2, formulated siRNA were incubated with serum-containing media +/−ApoE at 37° C. for 15-30 minutes. Media was removed from cells and pre-warmed complexes were layered on the cells at 100 uL/well at an siRNA concentration of 20 nM. ApoE concentration was titrated at 1.0, 3.0, 9.0, and 20.0 μg/ml. Cells were incubated with formulated duplexes for 24 hours. At day 3, cells lysed and prepared for bDNA analysis and kD calculations.

[0550] The presence of Apo E improved kD in a number of cell lines including HCT-116, HeLa, A375, and B16F10 (data not shown).

### Example 23

### IC₅₀ of KSP siRNA in the Presence of ApoE

[0551] The effect of ApoE on the IC₅₀ (efficacy) of LNP-08 formulated siRNA targeting KSP was evaluated in multiple cell lines. Both LNP08 and LNP08 with Cl8PEG formulated siRNA were used. The KSP targeted siRNA duplex was AL-DP-6248.

[0552] At day 0, cells were plated at 15,000-20,000 per well in 96 well plates. At day 1, serum-containing media, formulated duplex, and +/−3 ug/ml ApoE were incubated at 37° C. for 15-30 minutes. Serial dilutions of siRNA were used in the 0.01 nM to 1.0 μM range. Media was removed from cells and pre-warmed complexes were layered on cells at 100 uL/well. Cells were incubated with siRNA for 24 hours. At day 2, cells were lysed and prepared for bDNA analysis as described herein. KSP mRNA levels were determined using a Quantigene 1.0 to determine KSP levels in comparison to GAPDH. Negative control was luciferase targeted siRNA, AD-1955.

[0553] The results are shown in the table below. LNP-08 formulated siRNA was active in all cell lines. In some cell lines the addition of ApoE improved efficacy of siRNA treatment as demonstrated by a lower IC₅₀.

| | | | IC₅₀ | | | |
|---|---|---|---|---|---|---|
| | | | | LNP08 C18 + | | LNP08 + |
| Cell Line | Cell Type | Species | LNP08 C18 | 3 ug/mL ApoE | LNP08 | 3 ug/mL ApoE |
| HeLa | Cervical | Human | 7.02 | 3.51 | 2.75 | 2.02 |
| | Adenocarcinoma | | | | | |
| HCT116 | Colorectal | Human | 4.71 | 3.89 | 0.4 | 0.44 |
| | carcinoma | | | | | |
| A375 | Melanoma | Human | >500 | 24.82 | 7.08 | 0.94 |
| MCF7 | Breast | Human | >500 | >500 | 19.98 | 10.26 |
| | adenocarcinoma | | | | | |
| B16F10 | Melanoma | Mouse | 13.92 | >500 | 18.52 | 2.37 |
| Hep3b | Hepatic | Human | 60.47*/NA | 22.13*/>600 | 1.4 | 8.98 |
| HUH 7 | Hepatic | Human | NA | >600 | 14.26 | 1.8 |
| HepG2 | Hepatic | Human | 433 nM | 67.3 (1 ug/ml)/ | 1.27 | 0.38 |
| | | | | 0.45 (3 ug/ml) | | |
| Skov 3 | Ovarian | Human | NA | NA | 3.95 | 7.26 |
| U87 | Glioblastoma | Human | NA | NA | 464.74 | 283.68 |
| PC3 | Prostate | Human | NA | >600 | 96.62 | 59 |

### Example 24

### Inhibition of Eg5/KSP and VEGF Expression in Humans

[0554] A human subject is treated with a pharmaceutical composition, e.g., a nucleic acid-lipid particle having both a dsRNA targeted to a Eg5/KSP gene and a dsRNA targeted to a VEGF gene to inhibit expression of the Eg5/KSP and VEGF genes in a nucleic acid-lipid particle. The nucleic acid-lipid particle comprises, e.g., XTC, MC3, or ALNY-100.

[0555] A subject in need of treatment is selected or identified. The subject can be in need of cancer treatment, e.g., liver cancer.

[0556] At time zero, a suitable first dose of the composition is subcutaneously administered to the subject. The composition is formulated as described herein. After a period of time, the subject's condition is evaluated, e.g., by measurement of tumor growth, measuring serum AFP levels, and the like. This measurement can be accompanied by a measurement of Eg5/KSP and/or VEGF expression in said subject, and/or the products of the successful siRNA-targeting of Eg5/KSP and/or VEGF mRNA. Other relevant criteria can also be measured. The number and strength of doses are adjusted according to the subject's needs.

[0557] After treatment, the subject's condition is compared to the condition existing prior to the treatment, or relative to the condition of a similarly afflicted but untreated subject.

[0558] Those skilled in the art are familiar with methods and compositions in addition to those specifically set out in the present disclosure which will allow them to practice this invention to the full scope of the claims hereinafter appended. Attorney Docket No: 26421-16564

We claim:

1. A composition comprising a nucleic acid lipid particle comprising a first double-stranded ribonucleic acid (dsRNA) for inhibiting the expression of a human kinesin family member 11 (Eg5/KSP) gene in a cell and a second dsRNA for inhibiting expression of a human VEGF in a cell, wherein:
the nucleic acid lipid particle comprises a lipid formulation comprising 45-65 mol % of a cationic lipid, 5 mol % to about 10 mol %, of a non-cationic lipid, 25-40 mol % of a sterol, and 0.5-5 mol % of a PEG or PEG-modified lipid,
the first dsRNA consists of a first sense strand and a first antisense strand, and the first sense strand comprises a first sequence and the first antisense strand comprises a second sequence complementary to at least 15 contiguous nucleotides of SEQ ID NO:1311 (5′-UCGAGAAUCUAAACUAACU-3′),
wherein the first sequence is complementary to the second sequence and wherein the first dsRNA is between 15 and 30 base pairs in length; and
the second dsRNA consists of a second sense strand and a second antisense strand, the second sense strand comprising a third sequence and the second antisense strand comprising a fourth sequence complementary to at least 15 contiguous nucleotides of SEQ ID NO:1538 (5′-GCACAUAGGAGAGAUGAGCUU-3′),
wherein the third sequence is complementary to the fourth sequence and wherein the second dsRNA is between 15 and 30 base pairs in length.

2. The composition of claim 1, wherein the cationic lipid comprises formula A wherein formula A is [chemical structure]
where R1 and R2 are independently alkyl, alkenyl or alkynyl, each can be optionally substituted, and R3 and R4 are independently lower alkyl or R3 and R4 can be taken together to form an optionally substituted heterocyclic ring.

3. The composition of claim 2, wherein the cationic lipid comprises XTC (2,2-Dilinoleyl-4-dimethylaminoethyl-[1,3]-dioxolane).

4. The composition of claim 2, wherein the cationic lipid comprises XTC, the non-cationic lipid comprises DSPC, the sterol comprises cholesterol and the PEG lipid comprises PEG-DMG.

5. The composition of claim 2, wherein the cationic lipid comprises XTC and the formulation is selected from the group consisting of:

| | |
|---|---|
| LNP05 | XTC/DSPC/Cholesterol/PEG-DMG |
| | 57.5/7.5/31.5/3.5 |
| | lipid:siRNA ~6:1 |
| LNP06 | XTC/DSPC/Cholesterol/PEG-DMG |
| | 57.5/7.5/31.5/3.5 |
| | lipid:siRNA ~11:1 |
| LNP07 | XTC/DSPC/Cholesterol/PEG-DMG |
| | 60/7.5/31/1.5, |
| | lipid:siRNA ~6:1 |
| LNP08 | XTC/DSPC/Cholesterol/PEG-DMG |
| | 60/7.5/31/1.5, |
| | lipid:siRNA ~11:1 |
| LNP09 | XTC/DSPC/Cholesterol/PEG-DMG |
| | 50/10/38.5/1.5 |
| | lipid:siRNA ~10:1 |
| LNP13 | XTC/DSPC/Cholesterol/PEG-DMG |
| | 50/10/38.5/1.5 |
| | lipid:siRNA ~33:1 |
| LNP22 | XTC/DSPC/Cholesterol/PEG-DSG |
| | 50/10/38.5/1.5 |
| | lipid:siRNA ~10 |

6. The composition of claim 1, wherein the cationic lipid comprises ALNY-100 ((3aR,5s,6aS)-N,N-dimethyl-2,2-di((9Z,12Z)-octadeca-9,12-dienyl)tetrahydro-3aH-cyclopenta[d][1,3]dioxol-5-amine)).

7. The composition of claim 6, wherein the cationic lipid comprises ALNY-100 and the formulation consists of:

| | |
|---|---|
| LNP10 | ALNY-100/DSPC/Cholesterol/PEG-DMG |
| | 50/10/38.5/1.5 |
| | lipid:siRNA ~10:1 |

8. The composition of claim 1, wherein the cationic lipid comprises MC3 (((6Z,9Z,28Z,31Z)-heptatriaconta-6,9,28,31-tetraen-19-yl 4-(dimethylamino)butanoate).

9. The composition of claim 8, wherein the cationic lipid comprises MC3 and the lipid formulation is selected from the group consisting of:

| | |
|---|---|
| LNP11 | MC3/DSPC/Cholesterol/PEG-DMG |
| | 50/10/38.5/1.5 |
| | lipid:siRNA ~10:1 |
| LNP14 | MC3/DSPC/Cholesterol/PEG-DMG |
| | 40/15/40/5 |
| | lipid:siRNA ~11 |
| LNP15 | MC3/DSPC/Cholesterol/PEG-DSG/GalNAc-PEG-DSG |
| | 50/10/35/4.5/0.5 |
| | lipid:siRNA ~11 |
| LNP16 | MC3/DSPC/Cholesterol/PEG-DMG |
| | 50/10/38.5/1.5 |
| | lipid:siRNA ~7 |
| LNP17 | MC3/DSPC/Cholesterol/PEG-DSG |
| | 50/10/38.5/1.5 |
| | lipid:siRNA ~10 |
| LNP18 | MC3/DSPC/Cholesterol/PEG-DMG |
| | 50/10/38.5/1.5 |
| | lipid:siRNA ~12 |
| LNP19 | MC3/DSPC/Cholesterol/PEG-DMG |
| | 50/10/35/5 |
| | lipid:siRNA ~8 |
| LNP20 | MC3/DSPC/Cholesterol/PEG-DPG |
| | 50/10/38.5/1.5 |
| | lipid:siRNA ~10 |

10. The composition of claim 1, wherein the first dsRNA consists of a sense strand consisting of SEQ ID NO:1534 (5′-UCGAGAAUCUAAACUAACUTT-3′) and an antisense strand consisting of SEQ ID NO:1535 (5′-AGUUAGUUUAGAUUCCUGATT-3′) and the second dsRNA consists of a sense strand consisting of SEQ ID NO:1536 (5′-GCACAUAGGAGAGAUGAGCUU-3′), and an antisense strand consisting of SEQ ID NO:1537 (5′-AAGCUCAUCUCUCCUAUGUGCUG-3′).

11. The composition of claim 10, wherein each strand is modified as follows to include a 2′-O-methyl ribonucleotide as indicated by a lower case letter “c” or “u” and a phosphorothioate as indicated by a lower case letter “s”:
the first dsRNA consists of a sense strand consisting of SEQ ID NO:1240 (5′-ucGAGAAucuAAAcuAAcuTsT-3′)
and an antisense strand consisting of SEQ ID NO:1241 (5′-AGUuAGUUuAGAUUCUCGATsT);
the second dsRNA consists of a sense strand consisting of SEQ ID NO:1242 (5′-GcAcAuAGGAGAGAuGAGCUsU-3′)
and an antisense strand consisting of SEQ ID NO:1243 (5′-AAGCUcAUCUCUCCuAuGuGCusG-3′).

12. The composition of claim 1, wherein the first and second dsRNA comprises at least one modified nucleotide.

13. The composition of claim 12, wherein the modified nucleotide is chosen from the group of: a 2′-O-methyl modified nucleotide, a nucleotide comprising a 5′-phosphorothioate group, and a terminal nucleotide linked to a cholesteryl derivative or dodecanoic acid bisdecylamide group.

14. The composition of claim 12, wherein the modified nucleotide is chosen from the group of: a 2′-deoxy-2′-fluoro modified nucleotide, a 2′-deoxy-modified nucleotide, a locked nucleotide, an abasic nucleotide, 2′-amino-modified nucleotide, 2′-alkyl-modified nucleotide, morpholino nucleotide, a phosphoramidate, and a non-natural base comprising nucleotide.

15. The composition of claim 1, wherein the first and second dsRNA each comprise at least one 2′-O-methyl modified ribonucleotide and at least one nucleotide comprising a 5′-phosphorothioate group.

16. The composition of claim 1, wherein each strand of each dsRNA is 19-23 bases in length.

17. The composition of claim 1, wherein each strand of each dsRNA is 21-23 bases in length.

18. The composition of claim 1, wherein each strand of the first dsRNA is 21 bases in length and the sense strand of the second dsRNA is 21 bases in length and the antisense strand of the second dsRNA is 23 bases in length.

19. The composition of claim 1, wherein the first and second dsRNA are present in an equimolar ratio.

20. The composition of claim 1, further comprising Sorafenib.

21. The composition of claim 1, further comprising a lipoprotein.

22. The composition of claim 1, further comprising apolipoprotein E (ApoE).

23. The composition of claim 1, wherein the composition, upon contact with a cell expressing Eg5, inhibits expression of Eg5 by at least 40%.

24. The composition of claim 1, wherein the composition, upon contact with a cell expressing VEGF, inhibits expression of VEGF by at least 40%.

25. The composition of claim 1 wherein administration of the composition to a cell decreases expression of Eg5 and VEGF in the cell.

26. The composition of claim 25, wherein the composition is administered in a nM concentration.

27. The composition of claim 1, wherein administration of the composition to a cell increases monoaster formation in the cell.

28. The composition of claim 1, wherein administration of the composition to a mammal results in at least one effect selected from the group consisting of prevention of tumor growth, reduction in tumor growth, or prolonged survival in the mammal.

29. The composition of claim 28, wherein the effect is measured using at least one assay selected from the group consisting of determination of body weight, determination of organ weight, visual inspection, mRNA analysis, serum AFP analysis and survival monitoring.

30. A method for inhibiting the expression of Eg5/KSP and VEGF in a cell comprising administering the composition of claim 1 to the cell.

31. A method for preventing tumor growth, reducing tumor growth, or prolonging survival in a mammal in need of treatment for cancer comprising administering the composition of claim 1 to the mammal.

32. The method of claim 31, wherein the mammal has liver cancer.

33. The method of claim 31, wherein the mammal is a human with liver cancer.

34. The method of claim 31, wherein a dose containing between 0.25 mg/kg and 4 mg/kg dsRNA is administered to the mammal.

35. The method of claim 31, wherein the dsRNA is administered to a human at about 0.01, 0.1, 0.5, 1.0, 2.5, or 5.0 mg/kg.

36. A method for reducing tumor growth in a mammal in need of treatment for cancer comprising administering the composition of claim 1 to the mammal, the method reducing tumor growth by at least 20%.

37. The method of claim 36, wherein the method reduces KSP expression by at least 60%.

The application's sequence listing, which the Patent Office published only in electronic form, follows.

SEQUENCE LISTING (2443 sequences)

SEQ ID NO: 1 - DNA, 21 bp, Artificial Sequence
  Description of Artificial Sequence: Synthetic oligonucleotide
  Description of Combined DNA/RNA Molecule: Synthetic oligonucleotide
cgaaguguuguuuguccaatt

SEQ ID NO: 2 - DNA, 21 bp, Artificial Sequence
  Description of Artificial Sequence: Synthetic oligonucleotide
  Description of Combined DNA/RNA Molecule: Synthetic oligonucleotide
uuggacaaacaacacuucgtt

SEQ ID NO: 3 - DNA, 21 bp, Artificial Sequence
  Description of Artificial Sequence: Synthetic oligonucleotide
  Description of Combined DNA/RNA Molecule: Synthetic oligonucleotide
ugguguuuggagcaucuactt

SEQ ID NO: 4 - DNA, 21 bp, Artificial Sequence
  Description of Artificial Sequence: Synthetic oligonucleotide
  Description of Combined DNA/RNA Molecule: Synthetic oligonucleotide
guagaugcuccaaacaccatt

SEQ ID NO: 5 - DNA, 21 bp, Artificial Sequence
  Description of Artificial Sequence: Synthetic oligonucleotide
  Description of Combined DNA/RNA Molecule: Synthetic oligonucleotide
ucuaaacuaacuagaaucctt

SEQ ID NO: 6 - DNA, 21 bp, Artificial Sequence
  Description of Artificial Sequence: Synthetic oligonucleotide
  Description of Combined DNA/RNA Molecule: Synthetic oligonucleotide
ggauucuaguuaguuuagatt

SEQ ID NO: 7 - DNA, 21 bp, Artificial Sequence
  Description of Artificial Sequence: Synthetic oligonucleotide
  Description of Combined DNA/RNA Molecule: Synthetic oligonucleotide
cuuaucgagaaucuaaacutt

SEQ ID NO: 8 - DNA, 21 bp, Artificial Sequence
  Description of Artificial Sequence: Synthetic oligonucleotide
  Description of Combined DNA/RNA Molecule: Synthetic oligonucleotide
aguuuagauucucgauaagtt

SEQ ID NO: 9 - DNA, 21 bp, Artificial Sequence
  Description of Artificial Sequence: Synthetic oligonucleotide
  Description of Combined DNA/RNA Molecule: Synthetic oligonucleotide
uugauguuuaccgaagugutt

SEQ ID NO: 10 - DNA, 21 bp, Artificial Sequence
  Description of Artificial Sequence: Synthetic oligonucleotide
  Description of Combined DNA/RNA Molecule: Synthetic oligonucleotide
acacuucgguaaacaucaatt

SEQ ID NO: 11 - DNA, 21 bp, Artificial Sequence
  Description of Artificial Sequence: Synthetic oligonucleotide
  Description of Combined DNA/RNA Molecule: Synthetic oligonucleotide
gugagaugcagaccauuuatt

SEQ ID NO: 12 - DNA, 21 bp, Artificial Sequence
  Description of Artificial Sequence: Synthetic oligonucleotide
  Description of Combined DNA/RNA Molecule: Synthetic oligonucleotide
uaaauggucugcaucucactt

SEQ ID NO: 13 - DNA, 21 bp, Artificial Sequence
  Description of Artificial Sequence: Synthetic oligonucleotide
  Description of Combined DNA/RNA Molecule: Synthetic oligonucleotide
ucugaguacauuggaauautt

SEQ ID NO: 14 - DNA, 21 bp, Artificial Sequence
  Description of Artificial Sequence: Synthetic oligonucleotide
  Description of Combined DNA/RNA Molecule: Synthetic oligonucleotide
auauuccaauguacucagatt

SEQ ID NO: 15 - DNA, 21 bp, Artificial Sequence
  Description of Artificial Sequence: Synthetic oligonucleotide
  Description of Combined DNA/RNA Molecule: Synthetic oligonucleotide
gaaguguuguuuguccaautt

SEQ ID NO: 16 - DNA, 21 bp, Artificial Sequence
  Description of Artificial Sequence: Synthetic oligonucleotide
  Description of Combined DNA/RNA Molecule: Synthetic oligonucleotide
auuggacaaacaacacuuctt

SEQ ID NO: 17 - DNA, 21 bp, Artificial Sequence
  Description of Artificial Sequence: Synthetic oligonucleotide
  Description of Combined DNA/RNA Molecule: Synthetic oligonucleotide
uuauuaugggcuauaauugtt

SEQ ID NO: 18 - DNA, 21 bp, Artificial Sequence
  Description of Artificial Sequence: Synthetic oligonucleotide
  Description of Combined DNA/RNA Molecule: Synthetic oligonucleotide
caauuauagcccauaauaatt

SEQ ID NO: 19 - DNA, 21 bp, Artificial Sequence
  Description of Artificial Sequence: Synthetic oligonucleotide
  Description of Combined DNA/RNA Molecule: Synthetic oligonucleotide
aaggugaaaggucaccuaatt

SEQ ID NO: 20 - DNA, 21 bp, Artificial Sequence
  Description of Artificial Sequence: Synthetic oligonucleotide
  Description of Combined DNA/RNA Molecule: Synthetic oligonucleotide
uuaggugaccuuucaccuutt

SEQ ID NO: 21 - DNA, 21 bp, Artificial Sequence
  Description of Artificial Sequence: Synthetic oligonucleotide
  Description of Combined DNA/RNA Molecule: Synthetic oligonucleotide
uuacaauggaaggugaaagtt

SEQ ID NO: 22 - DNA, 21 bp, Artificial Sequence
  Description of Artificial Sequence: Synthetic oligonucleotide
  Description of Combined DNA/RNA Molecule: Synthetic oligonucleotide
cuuucaccuuccauuguaatt

SEQ ID NO: 23 - DNA, 21 bp, Artificial Sequence
  Description of Artificial Sequence: Synthetic oligonucleotide
  Description of Combined DNA/RNA Molecule: Synthetic oligonucleotide
aggugaaaggucaccuaautt

SEQ ID NO: 24 - DNA, 21 bp, Artificial Sequence
  Description of Artificial Sequence: Synthetic oligonucleotide
  Description of Combined DNA/RNA Molecule: Synthetic oligonucleotide
auuaggugaccuuucaccutt

SEQ ID NO: 25 - DNA, 21 bp, Artificial Sequence
  Description of Artificial Sequence: Synthetic oligonucleotide
  Description of Combined DNA/RNA Molecule: Synthetic oligonucleotide
ggugaaaggucaccuaaugtt

SEQ ID NO: 26 - DNA, 21 bp, Artificial Sequence
  Description of Artificial Sequence: Synthetic oligonucleotide
  Description of Combined DNA/RNA Molecule: Synthetic oligonucleotide
cauuaggugaccuuucacctt

SEQ ID NO: 27 - DNA, 21 bp, Artificial Sequence
  Description of Artificial Sequence: Synthetic oligonucleotide
  Description of Combined DNA/RNA Molecule: Synthetic oligonucleotide
ccuuaucgagaaucuaaactt

SEQ ID NO: 28 - DNA, 21 bp, Artificial Sequence
  Description of Artificial Sequence: Synthetic oligonucleotide
  Description of Combined DNA/RNA Molecule: Synthetic oligonucleotide
guuuagauucucgauaaggtt

SEQ ID NO: 29 - DNA, 21 bp, Artificial Sequence
  Description of Artificial Sequence: Synthetic oligonucleotide
  Description of Combined DNA/RNA Molecule: Synthetic oligonucleotide
cucuuauuaaggaguauactt

SEQ ID NO: 30 - DNA, 21 bp, Artificial Sequence
  Description of Artificial Sequence: Synthetic oligonucleotide
  Description of Combined DNA/RNA Molecule: Synthetic oligonucleotide
guauacuccuuaauaagagtt

SEQ ID NO: 31 - DNA, 21 bp, Artificial Sequence
  Description of Artificial Sequence: Synthetic oligonucleotide
  Description of Combined DNA/RNA Molecule: Synthetic oligonucleotide
gagagauucugugcuuuggtt

SEQ ID NO: 32 - DNA, 21 bp, Artificial Sequence
  Description of Artificial Sequence: Synthetic oligonucleotide
  Description of Combined DNA/RNA Molecule: Synthetic oligonucleotide
ccaaagcacagaaucucuctt

SEQ ID NO: 33 - DNA, 21 bp, Artificial Sequence
  Description of Artificial Sequence: Synthetic oligonucleotide
  Description of Combined DNA/RNA Molecule: Synthetic oligonucleotide
aucuaaacuaacuagaauctt

SEQ ID NO: 34 - DNA, 21 bp, Artificial Sequence
  Description of Artificial Sequence: Synthetic oligonucleotide
  Description of Combined DNA/RNA Molecule: Synthetic oligonucleotide
gauucuaguuaguuuagautt

SEQ ID NO: 35 - DNA, 21 bp, Artificial Sequence
  Description of Artificial Sequence: Synthetic oligonucleotide
  Description of Combined DNA/RNA Molecule: Synthetic oligonucleotide
ucaccaaaaaagcucuuautt

SEQ ID NO: 36 - DNA, 21 bp, Artificial Sequence
  Description of Artificial Sequence: Synthetic oligonucleotide
  Description of Combined DNA/RNA Molecule: Synthetic oligonucleotide
auaagagcuuuuuuggugatt

SEQ ID NO: 37 - DNA, 21 bp, Artificial Sequence
  Description of Artificial Sequence: Synthetic oligonucleotide
  Description of Combined DNA/RNA Molecule: Synthetic oligonucleotide
gagcuuuuugaucuucuuatt

SEQ ID NO: 38 - DNA, 21 bp, Artificial Sequence
  Description of Artificial Sequence: Synthetic oligonucleotide
  Description of Combined DNA/RNA Molecule: Synthetic oligonucleotide
uaagaagaucaaaaagcuctt

SEQ ID NO: 39 - DNA, 21 bp, Artificial Sequence
  Description of Artificial Sequence: Synthetic oligonucleotide
  Description of Combined DNA/RNA Molecule: Synthetic oligonucleotide
cguacaagaacaucuauaatt

SEQ ID NO: 40 - DNA, 21 bp, Artificial Sequence
  Description of Artificial Sequence: Synthetic oligonucleotide
  Description of Combined DNA/RNA Molecule: Synthetic oligonucleotide
uuauagauguucuuguacgtt

SEQ ID NO: 41 - DNA, 21 bp, Artificial Sequence
  Description of Artificial Sequence: Synthetic oligonucleotide
  Description of Combined DNA/RNA Molecule: Synthetic oligonucleotide
auugauguuuaccgaagugtt

SEQ ID NO: 42 - DNA, 21 bp, Artificial Sequence
  Description of Artificial Sequence: Synthetic oligonucleotide
  Description of Combined DNA/RNA Molecule: Synthetic oligonucleotide
cacuucgguaaacaucaautt

SEQ ID NO: 43 - DNA, 21 bp, Artificial Sequence
  Description of Artificial Sequence: Synthetic oligonucleotide
  Description of Combined DNA/RNA Molecule: Synthetic oligonucleotide
cuaaacuaacuagaauccutt

SEQ ID NO: 44 - DNA, 21 bp, Artificial Sequence
  Description of Artificial Sequence: Synthetic oligonucleotide
  Description of Combined DNA/RNA Molecule: Synthetic oligonucleotide
aggauucuaguuaguuuagtt

SEQ ID NO: 45 - DNA, 21 bp, Artificial Sequence
  Description of Artificial Sequence: Synthetic oligonucleotide
  Description of Combined DNA/RNA Molecule: Synthetic oligonucleotide
accgaaguguuguuugucctt

SEQ ID NO: 46 - DNA, 21 bp, Artificial Sequence
  Description of Artificial Sequence: Synthetic oligonucleotide
  Description of Combined DNA/RNA Molecule: Synthetic oligonucleotide
ggacaaacaacacuucggutt

SEQ ID NO: 47 - DNA, 21 bp, Artificial Sequence
  Description of Artificial Sequence: Synthetic oligonucleotide
  Description of Combined DNA/RNA Molecule: Synthetic oligonucleotide
ugguggugagaugcagacctt

SEQ ID NO: 48 - DNA, 21 bp, Artificial Sequence
  Description of Artificial Sequence: Synthetic oligonucleotide
  Description of Combined DNA/RNA Molecule: Synthetic oligonucleotide
ggucugcaucucaccaccatt

SEQ ID NO: 49 - DNA, 21 bp, Artificial Sequence
  Description of Artificial Sequence: Synthetic oligonucleotide
  Description of Combined DNA/RNA Molecule: Synthetic oligonucleotide
cauacucuagucguucccatt

SEQ ID NO: 50 - DNA, 21 bp, Artificial Sequence
  Description of Artificial Sequence: Synthetic oligonucleotide
  Description of Combined DNA/RNA Molecule: Synthetic oligonucleotide
ugggaacgacuagaguaugtt

SEQ ID NO: 51 - DNA, 21 bp, Artificial Sequence
  Description of Artificial Sequence: Synthetic oligonucleotide
  Description of Combined DNA/RNA Molecule: Synthetic oligonucleotide
agcgcccauucaauaguagtt

SEQ ID NO: 52 - DNA, 21 bp, Artificial Sequence
  Description of Artificial Sequence: Synthetic oligonucleotide
  Description of Combined DNA/RNA Molecule: Synthetic oligonucleotide
cuacuauugaaugggcgcutt

SEQ ID NO: 53 - DNA, 21 bp, Artificial Sequence
  Description of Artificial Sequence: Synthetic oligonucleotide
  Description of Combined DNA/RNA Molecule: Synthetic oligonucleotide
ggaaagcuagcgcccauuctt

SEQ ID NO: 54 - DNA, 21 bp, Artificial Sequence
  Description of Artificial Sequence: Synthetic oligonucleotide
  Description of Combined DNA/RNA Molecule: Synthetic oligonucleotide
gaaugggcgcuagcuuucctt

SEQ ID NO: 55 - DNA, 21 bp, Artificial Sequence
  Description of Artificial Sequence: Synthetic oligonucleotide
  Description of Combined DNA/RNA Molecule: Synthetic oligonucleotide
gaaagcuagcgcccauucatt

SEQ ID NO: 56 - DNA, 21 bp, Artificial Sequence
  Description of Artificial Sequence: Synthetic oligonucleotide
  Description of Combined DNA/RNA Molecule: Synthetic oligonucleotide
ugaaugggcgcuagcuuuctt

SEQ ID NO: 57 - DNA, 21 bp, Artificial Sequence
  Description of Artificial Sequence: Synthetic oligonucleotide
  Description of Combined DNA/RNA Molecule: Synthetic oligonucleotide
agaaacuacgauugauggatt

SEQ ID NO: 58 - DNA, 21 bp, Artificial Sequence
  Description of Artificial Sequence: Synthetic oligonucleotide
  Description of Combined DNA/RNA Molecule: Synthetic oligonucleotide
uccaucaaucguaguuucutt

SEQ ID NO: 59 - DNA, 21 bp, Artificial Sequence
  Description of Artificial Sequence: Synthetic oligonucleotide
  Description of Combined DNA/RNA Molecule: Synthetic oligonucleotide
uguuccuuaucgagaaucutt

SEQ ID NO: 60 - DNA, 21 bp, Artificial Sequence
  Description of Artificial Sequence: Synthetic oligonucleotide
  Description of Combined DNA/RNA Molecule: Synthetic oligonucleotide
agauucucgauaaggaacatt

SEQ ID NO: 61 - DNA, 21 bp, Artificial Sequence
  Description of Artificial Sequence: Synthetic oligonucleotide
  Description of Combined DNA/RNA Molecule: Synthetic oligonucleotide
cagauuaccucugcgagcctt

SEQ ID NO: 62 - DNA, 21 bp, Artificial Sequence
  Description of Artificial Sequence: Synthetic oligonucleotide
  Description of Combined DNA/RNA Molecule: Synthetic oligonucleotide
ggcucgcagagguaaucugtt

SEQ ID NO: 63 - DNA, 21 bp, Artificial Sequence
  Description of Artificial Sequence: Synthetic oligonucleotide
  Description of Combined DNA/RNA Molecule: Synthetic oligonucleotide
gcgcccauucaauaguagatt

SEQ ID NO: 64 - DNA, 21 bp, Artificial Sequence
  Description of Artificial Sequence: Synthetic oligonucleotide
  Description of Combined DNA/RNA Molecule: Synthetic oligonucleotide
ucuacuauugaaugggcgctt

SEQ ID NO: 65 - DNA, 21 bp, Artificial Sequence
  Description of Artificial Sequence: Synthetic oligonucleotide
  Description of Combined DNA/RNA Molecule: Synthetic oligonucleotide
uugcacuaucuuugcguautt

SEQ ID NO: 66 - DNA, 21 bp, Artificial Sequence
  Description of Artificial Sequence: Synthetic oligonucleotide
  Description of Combined DNA/RNA Molecule: Synthetic oligonucleotide
auacgcaaagauagugcaatt

SEQ ID NO: 67 - DNA, 21 bp, Artificial Sequence
  Description of Artificial Sequence: Synthetic oligonucleotide
  Description of Combined DNA/RNA Molecule: Synthetic oligonucleotide
cagagcggaaagcuagcgctt

SEQ ID NO: 68 - DNA, 21 bp, Artificial Sequence
  Description of Artificial Sequence: Synthetic oligonucleotide
  Description of Combined DNA/RNA Molecule: Synthetic oligonucleotide
gcgcuagcuuuccgcucugtt

SEQ ID NO: 69 - DNA, 21 bp, Artificial Sequence
  Description of Artificial Sequence: Synthetic oligonucleotide
  Description of Combined DNA/RNA Molecule: Synthetic oligonucleotide
agaccuuauuugguaaucutt

SEQ ID NO: 70 - DNA, 21 bp, Artificial Sequence
  Description of Artificial Sequence: Synthetic oligonucleotide
  Description of Combined DNA/RNA Molecule: Synthetic oligonucleotide
agauuaccaaauaaggucutt

SEQ ID NO: 71 - DNA, 21 bp, Artificial Sequence
  Description of Artificial Sequence: Synthetic oligonucleotide
  Description of Combined DNA/RNA Molecule: Synthetic oligonucleotide
auucucuuggagggcguactt

SEQ ID NO: 72 - DNA, 21 bp, Artificial Sequence
  Description of Artificial Sequence: Synthetic oligonucleotide
  Description of Combined DNA/RNA Molecule: Synthetic oligonucleotide
guacgcccuccaagagaautt

SEQ ID NO: 73 - DNA, 21 bp, Artificial Sequence
  Description of Artificial Sequence: Synthetic oligonucleotide
  Description of Combined DNA/RNA Molecule: Synthetic oligonucleotide
ggcugguauaauuccacgutt

SEQ ID NO: 74 - DNA, 21 bp, Artificial Sequence
  Description of Artificial Sequence: Synthetic oligonucleotide
  Description of Combined DNA/RNA Molecule: Synthetic oligonucleotide
acguggaauuauaccagcctt

SEQ ID NO: 75 - DNA, 21 bp, Artificial Sequence
  Description of Artificial Sequence: Synthetic oligonucleotide
  Description of Combined DNA/RNA Molecule: Synthetic oligonucleotide
gcggaaagcuagcgcccautt

SEQ ID NO: 76 - DNA, 21 bp, Artificial Sequence
  Description of Artificial Sequence: Synthetic oligonucleotide
  Description of Combined DNA/RNA Molecule: Synthetic oligonucleotide
augggcgcuagcuuuccgctt

SEQ ID NO: 77 - DNA, 21 bp, Artificial Sequence
  Description of Artificial Sequence: Synthetic oligonucleotide
  Description of Combined DNA/RNA Molecule: Synthetic oligonucleotide
ugcacuaucuuugcguaugtt

SEQ ID NO: 78 - DNA, 21 bp, Artificial Sequence
  Description of Artificial Sequence: Synthetic oligonucleotide
  Description of Combined DNA/RNA Molecule: Synthetic oligonucleotide
cauacgcaaagauagugcatt

SEQ ID NO: 79 - DNA, 21 bp, Artificial Sequence
  Description of Artificial Sequence: Synthetic oligonucleotide
  Description of Combined DNA/RNA Molecule: Synthetic oligonucleotide
guauaauuccacguacccutt

SEQ ID NO: 80 - DNA, 21 bp, Artificial Sequence
  Description of Artificial Sequence: Synthetic oligonucleotide
  Description of Combined DNA/RNA Molecule: Synthetic oligonucleotide
aggguacguggaauuauactt

SEQ ID NO: 81 - DNA, 21 bp, Artificial Sequence
  Description of Artificial Sequence: Synthetic oligonucleotide
  Description of Combined DNA/RNA Molecule: Synthetic oligonucleotide
agaaucuaaacuaacuagatt

SEQ ID NO: 82 - DNA, 21 bp, Artificial Sequence
  Description of Artificial Sequence: Synthetic oligonucleotide
  Description of Combined DNA/RNA Molecule: Synthetic oligonucleotide
ucuaguuaguuuagauucutt

SEQ ID NO: 83 - DNA, 21 bp, Artificial Sequence
  Description of Artificial Sequence: Synthetic oligonucleotide
  Description of Combined DNA/RNA Molecule: Synthetic oligonucleotide
aggagcugaauaggguuactt

SEQ ID NO: 84 - DNA, 21 bp, Artificial Sequence
  Description of Artificial Sequence: Synthetic oligonucleotide
  Description of Combined DNA/RNA Molecule: Synthetic oligonucleotide
guaacccuauucagcuccutt

SEQ ID NO: 85 - DNA, 21 bp, Artificial Sequence
  Description of Artificial Sequence: Synthetic oligonucleotide
  Description of Combined DNA/RNA Molecule: Synthetic oligonucleotide
gaaguacauaagaccuuautt

SEQ ID NO: 86 - DNA, 21 bp, Artificial Sequence
  Description of Artificial Sequence: Synthetic oligonucleotide
  Description of Combined DNA/RNA Molecule: Synthetic oligonucleotide
auaaggucuuauguacuuctt

SEQ ID NO: 87 - DNA, 21 bp, Artificial Sequence
  Description of Artificial Sequence: Synthetic oligonucleotide
  Description of Combined DNA/RNA Molecule: Synthetic oligonucleotide
gacaguggccgauaagauatt

SEQ ID NO: 88 - DNA, 21 bp, Artificial Sequence
  Description of Artificial Sequence: Synthetic oligonucleotide
  Description of Combined DNA/RNA Molecule: Synthetic oligonucleotide
uaucuuaucggccacuguctt

SEQ ID NO: 89 - DNA, 21 bp, Artificial Sequence
  Description of Artificial Sequence: Synthetic oligonucleotide
  Description of Combined DNA/RNA Molecule: Synthetic oligonucleotide
aaaccacuuaguagugucctt

SEQ ID NO: 90 - DNA, 21 bp, Artificial Sequence
  Description of Artificial Sequence: Synthetic oligonucleotide
  Description of Combined DNA/RNA Molecule: Synthetic oligonucleotide
ggacacuacuaagugguuutt

SEQ ID NO: 91 - DNA, 21 bp, Artificial Sequence
  Description of Artificial Sequence: Synthetic oligonucleotide
  Description of Combined DNA/RNA Molecule: Synthetic oligonucleotide
ucccuagacuucccuauuutt

SEQ ID NO: 92 - DNA, 21 bp, Artificial Sequence
  Description of Artificial Sequence: Synthetic oligonucleotide
  Description of Combined DNA/RNA Molecule: Synthetic oligonucleotide
aaauagggaagucuagggatt

SEQ ID NO: 93 - DNA, 21 bp, Artificial Sequence
  Description of Artificial Sequence: Synthetic oligonucleotide
  Description of Combined DNA/RNA Molecule: Synthetic oligonucleotide
uagacuucccuauuucgcutt

SEQ ID NO: 94 - DNA, 21 bp, Artificial Sequence
  Description of Artificial Sequence: Synthetic oligonucleotide
  Description of Combined DNA/RNA Molecule: Synthetic oligonucleotide
agcgaaauagggaagucuatt

SEQ ID NO: 95 - DNA, 21 bp, Artificial Sequence
  Description of Artificial Sequence: Synthetic oligonucleotide
  Description of Combined DNA/RNA Molecule: Synthetic oligonucleotide
gcgucgcagccaaauucgutt

SEQ ID NO: 96 - DNA, 21 bp, Artificial Sequence
  Description of Artificial Sequence: Synthetic oligonucleotide
  Description of Combined DNA/RNA Molecule: Synthetic oligonucleotide
acgaauuuggcugcgacgctt

SEQ ID NO: 97 - DNA, 21 bp, Artificial Sequence
  Description of Artificial Sequence: Synthetic oligonucleotide
  Description of Combined DNA/RNA Molecule: Synthetic oligonucleotide
agcuagcgcccauucaauatt

SEQ ID NO: 98 - DNA, 21 bp, Artificial Sequence
  Description of Artificial Sequence: Synthetic oligonucleotide
  Description of Combined DNA/RNA Molecule: Synthetic oligonucleotide
uauugaaugggcgcuagcutt

SEQ ID NO: 99 - DNA, 21 bp, Artificial Sequence
  Description of Artificial Sequence: Synthetic oligonucleotide
  Description of Combined DNA/RNA Molecule: Synthetic oligonucleotide
gaaacuacgauugauggagtt

SEQ ID NO: 100 - DNA, 21 bp, Artificial Sequence
  Description of Artificial Sequence: Synthetic oligonucleotide
  Description of Combined DNA/RNA Molecule: Synthetic oligonucleotide
cuccaucaaucguaguuuctt

SEQ ID NO: 101 - DNA, 21 bp, Artificial Sequence
  Description of Artificial Sequence: Synthetic oligonucleotide
  Description of Combined DNA/RNA Molecule: Synthetic oligonucleotide
ccgauaagauagaagaucatt

SEQ ID NO: 102 - DNA, 21 bp, Artificial Sequence
  Description of Artificial Sequence: Synthetic oligonucleotide
  Description of Combined DNA/RNA Molecule: Synthetic oligonucleotide
ugaucuucuaucuuaucggtt

SEQ ID NO: 103 - DNA, 21 bp, Artificial Sequence
  Description of Artificial Sequence: Synthetic oligonucleotide
  Description of Combined DNA/RNA Molecule: Synthetic oligonucleotide
uagcgcccauucaauaguatt

SEQ ID NO: 104 - DNA, 21 bp, Artificial Sequence
  Description of Artificial Sequence: Synthetic oligonucleotide
  Description of Combined DNA/RNA Molecule: Synthetic oligonucleotide
uacuauugaaugggcgcuatt

SEQ ID NO: 105 - DNA, 21 bp, Artificial Sequence
  Description of Artificial Sequence: Synthetic oligonucleotide
  Description of Combined DNA/RNA Molecule: Synthetic oligonucleotide
uuugcguauggccaaacugtt

SEQ ID NO: 106 - DNA, 21 bp, Artificial Sequence
  Description of Artificial Sequence: Synthetic oligonucleotide
  Description of Combined DNA/RNA Molecule: Synthetic oligonucleotide
caguuuggccauacgcaaatt

SEQ ID NO: 107 - DNA, 21 bp, Artificial Sequence
  Description of Artificial Sequence: Synthetic oligonucleotide
  Description of Combined DNA/RNA Molecule: Synthetic oligonucleotide
cacguacccuucaucaaautt

SEQ ID NO: 108 - DNA, 21 bp, Artificial Sequence
  Description of Artificial Sequence: Synthetic oligonucleotide
  Description of Combined DNA/RNA Molecule: Synthetic oligonucleotide
auuugaugaaggguacgugtt

SEQ ID NO: 109 - DNA, 21 bp, Artificial Sequence
  Description of Artificial Sequence: Synthetic oligonucleotide
  Description of Combined DNA/RNA Molecule: Synthetic oligonucleotide
ucuuugcguauggccaaactt

SEQ ID NO: 110 - DNA, 21 bp, Artificial Sequence
  Description of Artificial Sequence: Synthetic oligonucleotide
  Description of Combined DNA/RNA Molecule: Synthetic oligonucleotide
guuuggccauacgcaaagatt

SEQ ID NO: 111 - DNA, 21 bp, Artificial Sequence
  Description of Artificial Sequence: Synthetic oligonucleotide
  Description of Combined DNA/RNA Molecule: Synthetic oligonucleotide
ccgaaguguuguuuguccatt

SEQ ID NO: 112 - DNA, 21 bp, Artificial Sequence
  Description of Artificial Sequence: Synthetic oligonucleotide
  Description of Combined DNA/RNA Molecule: Synthetic oligonucleotide
uggacaaacaacacuucggtt

SEQ ID NO: 113 - DNA, 21 bp, Artificial Sequence
  Description of Artificial Sequence: Synthetic oligonucleotide
  Description of Combined DNA/RNA Molecule: Synthetic oligonucleotide
agagcggaaagcuagcgcctt

SEQ ID NO: 114 - DNA, 21 bp, Artificial Sequence
  Description of Artificial Sequence: Synthetic oligonucleotide
  Description of Combined DNA/RNA Molecule: Synthetic oligonucleotide
ggcgcuagcuuuccgcucutt

SEQ ID NO: 115 - DNA, 21 bp, Artificial Sequence
  Description of Artificial Sequence: Synthetic oligonucleotide
  Description of Combined DNA/RNA Molecule: Synthetic oligonucleotide
gcuagcgcccauucaauagtt

SEQ ID NO: 116 - DNA, 21 bp, Artificial Sequence
  Description of Artificial Sequence: Synthetic oligonucleotide
  Description of Combined DNA/RNA Molecule: Synthetic oligonucleotide
cuauugaaugggcgcuagctt

SEQ ID NO: 117 - DNA, 21 bp, Artificial Sequence
  Description of Artificial Sequence: Synthetic oligonucleotide
  Description of Combined DNA/RNA Molecule: Synthetic oligonucleotide
aaguuaguguacgaacuggtt

SEQ ID NO: 118 - DNA, 21 bp, Artificial Sequence
  Description of Artificial Sequence: Synthetic oligonucleotide
  Description of Combined DNA/RNA Molecule: Synthetic oligonucleotide
ccaguucguacacuaacuutt

SEQ ID NO: 119 - DNA, 21 bp, Artificial Sequence
  Description of Artificial Sequence: Synthetic oligonucleotide
  Description of Combined DNA/RNA Molecule: Synthetic oligonucleotide
guacgaacuggaggauuggtt

SEQ ID NO: 120 - DNA, 21 bp, Artificial Sequence
  Description of Artificial Sequence: Synthetic oligonucleotide
  Description of Combined DNA/RNA Molecule: Synthetic oligonucleotide
ccaauccuccaguucguactt

SEQ ID NO: 121 - DNA, 21 bp, Artificial Sequence
  Description of Artificial Sequence: Synthetic oligonucleotide
  Description of Combined DNA/RNA Molecule: Synthetic oligonucleotide
acgaacuggaggauuggcutt

SEQ ID NO: 122 - DNA, 21 bp, Artificial Sequence
  Description of Artificial Sequence: Synthetic oligonucleotide
  Description of Combined DNA/RNA Molecule: Synthetic oligonucleotide
agccaauccuccaguucgutt

SEQ ID NO: 123 - DNA, 21 bp, Artificial Sequence
  Description of Artificial Sequence: Synthetic oligonucleotide
  Description of Combined DNA/RNA Molecule: Synthetic oligonucleotide
agauugauguuuaccgaagtt

SEQ ID NO: 124 - DNA, 21 bp, Artificial Sequence
  Description of Artificial Sequence: Synthetic oligonucleotide
  Description of Combined DNA/RNA Molecule: Synthetic oligonucleotide
cuucgguaaacaucaaucutt

SEQ ID NO: 125 - DNA, 21 bp, Artificial Sequence
  Description of Artificial Sequence: Synthetic oligonucleotide
  Description of Combined DNA/RNA Molecule: Synthetic oligonucleotide
uaugggcuauaauugcacutt

SEQ ID NO: 126 - DNA, 21 bp, Artificial Sequence
  Description of Artificial Sequence: Synthetic oligonucleotide
  Description of Combined DNA/RNA Molecule: Synthetic oligonucleotide
agugcaauuauagcccauatt

SEQ ID NO: 127 - DNA, 21 bp, Artificial Sequence
  Description of Artificial Sequence: Synthetic oligonucleotide
  Description of Combined DNA/RNA Molecule: Synthetic oligonucleotide
aucuuugcguauggccaaatt

SEQ ID NO: 128 - DNA, 21 bp, Artificial Sequence
  Description of Artificial Sequence: Synthetic oligonucleotide
  Description of Combined DNA/RNA Molecule: Synthetic oligonucleotide
uuuggccauacgcaaagautt

SEQ ID NO: 129 - DNA, 21 bp, Artificial Sequence
  Description of Artificial Sequence: Synthetic oligonucleotide
  Description of Combined DNA/RNA Molecule: Synthetic oligonucleotide
acucuagucguucccacuctt

SEQ ID NO: 130 - DNA, 21 bp, Artificial Sequence
  Description of Artificial Sequence: Synthetic oligonucleotide
  Description of Combined DNA/RNA Molecule: Synthetic oligonucleotide
gagugggaacgacuagagutt

SEQ ID NO: 131 - DNA, 21 bp, Artificial Sequence
  Description of Artificial Sequence: Synthetic oligonucleotide
  Description of Combined DNA/RNA Molecule: Synthetic oligonucleotide
aacuacgauugauggagaatt

SEQ ID NO: 132 - DNA, 21 bp, Artificial Sequence
  Description of Artificial Sequence: Synthetic oligonucleotide
  Description of Combined DNA/RNA Molecule: Synthetic oligonucleotide
uucuccaucaaucguaguutt

SEQ ID NO: 133 - DNA, 21 bp, Artificial Sequence
  Description of Artificial Sequence: Synthetic oligonucleotide
  Description of Combined DNA/RNA Molecule: Synthetic oligonucleotide
gauaagagagcucgggaagtt

SEQ ID NO: 134 - DNA, 21 bp, Artificial Sequence
  Description of Artificial Sequence: Synthetic oligonucleotide
  Description of Combined DNA/RNA Molecule: Synthetic oligonucleotide
cuucccgagcucucuuauctt

SEQ ID NO: 135 - DNA, 21 bp, Artificial Sequence
  Description of Artificial Sequence: Synthetic oligonucleotide
  Description of Combined DNA/RNA Molecule: Synthetic oligonucleotide
ucgagaaucuaaacuaacutt

SEQ ID NO: 136 - DNA, 21 bp, Artificial Sequence
  Description of Artificial Sequence: Synthetic oligonucleotide
  Description of Combined DNA/RNA Molecule: Synthetic oligonucleotide
aguuaguuuagauucucgatt

SEQ ID NO: 137 - DNA, 21 bp, Artificial Sequence
  Description of Artificial Sequence: Synthetic oligonucleotide
  Description of Combined DNA/RNA Molecule: Synthetic oligonucleotide
aacuaacuagaauccuccatt

SEQ ID NO: 138 - DNA, 21 bp, Artificial Sequence
  Description of Artificial Sequence: Synthetic oligonucleotide
  Description of Combined DNA/RNA Molecule: Synthetic oligonucleotide
uggaggauucuaguuaguutt

SEQ ID NO: 139 - DNA, 21 bp, Artificial Sequence
  Description of Artificial Sequence: Synthetic oligonucleotide
  Description of Combined DNA/RNA Molecule: Synthetic oligonucleotide
ggaucguaagaaggcaguutt

SEQ ID NO: 140 - DNA, 21 bp, Artificial Sequence
  Description of Artificial Sequence: Synthetic oligonucleotide
  Description of Combined DNA/RNA Molecule: Synthetic oligonucleotide
aacugccuucuuacgaucctt

SEQ ID NO: 141 - DNA, 21 bp, Artificial Sequence
  Description of Artificial Sequence: Synthetic oligonucleotide
  Description of Combined DNA/RNA Molecule: Synthetic oligonucleotide
aucguaagaaggcaguugatt

SEQ ID NO: 142 - DNA, 21 bp, Artificial Sequence
  Description of Artificial Sequence: Synthetic oligonucleotide
  Description of Combined DNA/RNA Molecule: Synthetic oligonucleotide
ucaacugccuucuuacgautt

SEQ ID NO: 143 - DNA, 21 bp, Artificial Sequence
  Description of Artificial Sequence: Synthetic oligonucleotide
  Description of Combined DNA/RNA Molecule: Synthetic oligonucleotide
aggcaguugaccaacacaatt

SEQ ID NO: 144 - DNA, 21 bp, Artificial Sequence
  Description of Artificial Sequence: Synthetic oligonucleotide
  Description of Combined DNA/RNA Molecule: Synthetic oligonucleotide
uuguguuggucaacugccutt

SEQ ID NO: 145 - DNA, 21 bp, Artificial Sequence
  Description of Artificial Sequence: Synthetic oligonucleotide
  Description of Combined DNA/RNA Molecule: Synthetic oligonucleotide
uggccgauaagauagaagatt

SEQ ID NO: 146 - DNA, 21 bp, Artificial Sequence
  Description of Artificial Sequence: Synthetic oligonucleotide
  Description of Combined DNA/RNA Molecule: Synthetic oligonucleotide
ucuucuaucuuaucggccatt

SEQ ID NO: 147 - DNA, 21 bp, Artificial Sequence
  Description of Artificial Sequence: Synthetic oligonucleotide
  Description of Combined DNA/RNA Molecule: Synthetic oligonucleotide
ucuaaggauauagucaacatt

SEQ ID NO: 148 - DNA, 21 bp, Artificial Sequence
  Description of Artificial Sequence: Synthetic oligonucleotide
  Description of Combined DNA/RNA Molecule: Synthetic oligonucleotide
uguugacuauauccuuagatt

SEQ ID NO: 149 - DNA, 21 bp, Artificial Sequence
  Description of Artificial Sequence: Synthetic oligonucleotide
  Description of Combined DNA/RNA Molecule: Synthetic oligonucleotide
acuaagcuuaauugcuuuctt

SEQ ID NO: 150 - DNA, 21 bp, Artificial Sequence
  Description of Artificial Sequence: Synthetic oligonucleotide
  Description of Combined DNA/RNA Molecule: Synthetic oligonucleotide
gaaagcaauuaagcuuagutt

SEQ ID NO: 151 - DNA, 21 bp, Artificial Sequence
  Description of Artificial Sequence: Synthetic oligonucleotide
  Description of Combined DNA/RNA Molecule: Synthetic oligonucleotide
gcccagaucaaccuuuaautt

SEQ ID NO: 152 - DNA, 21 bp, Artificial Sequence
  Description of Artificial Sequence: Synthetic oligonucleotide
  Description of Combined DNA/RNA Molecule: Synthetic oligonucleotide
auuaaagguugaucugggctt

SEQ ID NO: 153 - DNA, 21 bp, Artificial Sequence
  Description of Artificial Sequence: Synthetic oligonucleotide
  Description of Combined DNA/RNA Molecule: Synthetic oligonucleotide
uuaauuuggcagagcggaatt

SEQ ID NO: 154 - DNA, 21 bp, Artificial Sequence
  Description of Artificial Sequence: Synthetic oligonucleotide
  Description of Combined DNA/RNA Molecule: Synthetic oligonucleotide
uuccgcucugccaaauuaatt

SEQ ID NO: 155 - DNA, 21 bp, Artificial Sequence
  Description of Artificial Sequence: Synthetic oligonucleotide
  Description of Combined DNA/RNA Molecule: Synthetic oligonucleotide
uuaucgagaaucuaaacuatt

SEQ ID NO: 156 - DNA, 21 bp, Artificial Sequence
  Description of Artificial Sequence: Synthetic oligonucleotide
  Description of Combined DNA/RNA Molecule: Synthetic oligonucleotide
uaguuuagauucucgauaatt

SEQ ID NO: 157 - DNA, 21 bp, Artificial Sequence
  Description of Artificial Sequence: Synthetic oligonucleotide
  Description of Combined DNA/RNA Molecule: Synthetic oligonucleotide
cuagcgcccauucaauagutt

SEQ ID NO: 158 - DNA, 21 bp, Artificial Sequence
  Description of Artificial Sequence: Synthetic oligonucleotide
  Description of Combined DNA/RNA Molecule: Synthetic oligonucleotide
acuauugaaugggcgcuagtt

SEQ ID NO: 159 - DNA, 21 bp, Artificial Sequence
  Description of Artificial Sequence: Synthetic oligonucleotide
  Description of Combined DNA/RNA Molecule: Synthetic oligonucleotide
aauaguagaaugugauccutt

SEQ ID NO: 160 - DNA, 21 bp, Artificial Sequence
  Description of Artificial Sequence: Synthetic oligonucleotide
  Description of Combined DNA/RNA Molecule: Synthetic oligonucleotide
aggaucacauucuacuauutt

SEQ ID NO: 161 - DNA, 21 bp, Artificial Sequence
  Description of Artificial Sequence: Synthetic oligonucleotide
  Description of Combined DNA/RNA Molecule: Synthetic oligonucleotide
uacgaaaagaaguuagugutt

SEQ ID NO: 162 - DNA, 21 bp, Artificial Sequence
  Description of Artificial Sequence: Synthetic oligonucleotide
  Description of Combined DNA/RNA Molecule: Synthetic oligonucleotide
acacuaacuucuuuucguatt

SEQ ID NO: 163 - DNA, 21 bp, Artificial Sequence
  Description of Artificial Sequence: Synthetic oligonucleotide
  Description of Combined DNA/RNA Molecule: Synthetic oligonucleotide
agaaguuaguguacgaacutt

SEQ ID NO: 164 - DNA, 21 bp, Artificial Sequence
  Description of Artificial Sequence: Synthetic oligonucleotide
  Description of Combined DNA/RNA Molecule: Synthetic oligonucleotide
aguucguacacuaacuucutt

SEQ ID NO: 165 - DNA, 21 bp, Artificial Sequence
  Description of Artificial Sequence: Synthetic oligonucleotide
  Description of Combined DNA/RNA Molecule: Synthetic oligonucleotide
acuaaacagauugauguuutt

SEQ ID NO: 166 - DNA, 21 bp, Artificial Sequence
  Description of Artificial Sequence: Synthetic oligonucleotide
  Description of Combined DNA/RNA Molecule: Synthetic oligonucleotide
aaacaucaaucuguuuagutt

SEQ ID NO: 167 - DNA, 21 bp, Artificial Sequence
  Description of Artificial Sequence: Synthetic oligonucleotide
  Description of Combined DNA/RNA Molecule: Synthetic oligonucleotide
cuuugcguauggccaaacutt

SEQ ID NO: 168 - DNA, 21 bp, Artificial Sequence
  Description of Artificial Sequence: Synthetic oligonucleotide
  Description of Combined DNA/RNA Molecule: Synthetic oligonucleotide
aguuuggccauacgcaaagtt

SEQ ID NO: 169 - DNA, 21 bp, Artificial Sequence
  Description of Artificial Sequence: Synthetic oligonucleotide
  Description of Combined DNA/RNA Molecule: Synthetic oligonucleotide
aaugaagaguauaccugggtt

SEQ ID NO: 170 - DNA, 21 bp, Artificial Sequence
  Description of Artificial Sequence: Synthetic oligonucleotide
  Description of Combined DNA/RNA Molecule: Synthetic oligonucleotide
cccagguauacucuucauutt

SEQ ID NO: 171 - DNA, 21 bp, Artificial Sequence
  Description of Artificial Sequence: Synthetic oligonucleotide
  Description of Combined DNA/RNA Molecule: Synthetic oligonucleotide
auaauuccacguacccuuctt

SEQ ID NO: 172 - DNA, 21 bp, Artificial Sequence
  Description of Artificial Sequence: Synthetic oligonucleotide
  Description of Combined DNA/RNA Molecule: Synthetic oligonucleotide
gaaggguacguggaauuautt

SEQ ID NO: 173 - DNA, 21 bp, Artificial Sequence
  Description of Artificial Sequence: Synthetic oligonucleotide
  Description of Combined DNA/RNA Molecule: Synthetic oligonucleotide
acguacccuucaucaaauutt

SEQ ID NO: 174 - DNA, 21 bp, Artificial Sequence
  Description of Artificial Sequence: Synthetic oligonucleotide
  Description of Combined DNA/RNA Molecule: Synthetic oligonucleotide
aauuugaugaaggguacgutt

SEQ ID NO: 175 - DNA, 21 bp, Artificial Sequence
  Description of Artificial Sequence: Synthetic oligonucleotide
  Description of Combined DNA/RNA Molecule: Synthetic oligonucleotide
cguacccuucaucaaauuutt

SEQ ID NO: 176 - DNA, 21 bp, Artificial Sequence
  Description of Artificial Sequence: Synthetic oligonucleotide
  Description of Combined DNA/RNA Molecule: Synthetic oligonucleotide
aaauuugaugaaggguacgtt

SEQ ID NO: 177 - DNA, 21 bp, Artificial Sequence
  Description of Artificial Sequence: Synthetic oligonucleotide
  Description of Combined DNA/RNA Molecule: Synthetic oligonucleotide
guacccuucaucaaauuuutt

SEQ ID NO: 178 - DNA, 21 bp, Artificial Sequence
  Description of Artificial Sequence: Synthetic oligonucleotide
  Description of Combined DNA/RNA Molecule: Synthetic oligonucleotide
aaaauuugaugaaggguactt

SEQ ID NO: 179 - DNA, 21 bp, Artificial Sequence
  Description of Artificial Sequence: Synthetic oligonucleotide
  Description of Combined DNA/RNA Molecule: Synthetic oligonucleotide
aacuuacugauaaugguactt

SEQ ID NO: 180 - DNA, 21 bp, Artificial Sequence
  Description of Artificial Sequence: Synthetic oligonucleotide
  Description of Combined DNA/RNA Molecule: Synthetic oligonucleotide
guaccauuaucaguaaguutt

SEQ ID NO: 181 - DNA, 21 bp, Artificial Sequence
  Description of Artificial Sequence: Synthetic oligonucleotide
  Description of Combined DNA/RNA Molecule: Synthetic oligonucleotide
uucagucaaagugucucugtt

SEQ ID NO: 182 - DNA, 21 bp, Artificial Sequence
  Description of Artificial Sequence: Synthetic oligonucleotide
  Description of Combined DNA/RNA Molecule: Synthetic oligonucleotide
cagagacacuuugacugaatt

SEQ ID NO: 183 - DNA, 21 bp, Artificial Sequence
  Description of Artificial Sequence: Synthetic oligonucleotide
  Description of Combined DNA/RNA Molecule: Synthetic oligonucleotide
uucuuaauccaucaucugatt

SEQ ID NO: 184 - DNA, 21 bp, Artificial Sequence
  Description of Artificial Sequence: Synthetic oligonucleotide
  Description of Combined DNA/RNA Molecule: Synthetic oligonucleotide
ucagaugauggauuaagaatt

SEQ ID NO: 185 - DNA, 21 bp, Artificial Sequence
  Description of Artificial Sequence: Synthetic oligonucleotide
  Description of Combined DNA/RNA Molecule: Synthetic oligonucleotide
acaguacacaacaaggaugtt

SEQ ID NO: 186 - DNA, 21 bp, Artificial Sequence
  Description of Artificial Sequence: Synthetic oligonucleotide
  Description of Combined DNA/RNA Molecule: Synthetic oligonucleotide
cauccuuguuguguacugutt

SEQ ID NO: 187 - DNA, 21 bp, Artificial Sequence
  Description of Artificial Sequence: Synthetic oligonucleotide
  Description of Combined DNA/RNA Molecule: Synthetic oligonucleotide
aagaaacuacgauugauggtt

SEQ ID NO: 188 - DNA, 21 bp, Artificial Sequence
  Description of Artificial Sequence: Synthetic oligonucleotide
  Description of Combined DNA/RNA Molecule: Synthetic oligonucleotide
ccaucaaucguaguuucuutt

SEQ ID NO: 189 - DNA, 21 bp, Artificial Sequence
  Description of Artificial Sequence: Synthetic oligonucleotide
  Description of Combined DNA/RNA Molecule: Synthetic oligonucleotide
aaacuacgauugauggagatt

SEQ ID NO: 190 - DNA, 21 bp, Artificial Sequence
  Description of Artificial Sequence: Synthetic oligonucleotide
  Description of Combined DNA/RNA Molecule: Synthetic oligonucleotide
ucuccaucaaucguaguuutt

SEQ ID NO: 191 - DNA, 21 bp, Artificial Sequence
  Description of Artificial Sequence: Synthetic oligonucleotide
  Description of Combined DNA/RNA Molecule: Synthetic oligonucleotide
uggagcuguugauaagagatt

SEQ ID NO: 192 - DNA, 21 bp, Artificial Sequence
  Description of Artificial Sequence: Synthetic oligonucleotide
  Description of Combined DNA/RNA Molecule: Synthetic oligonucleotide
ucucuuaucaacagcuccatt

SEQ ID NO: 193 - DNA, 21 bp, Artificial Sequence
  Description of Artificial Sequence: Synthetic oligonucleotide
  Description of Combined DNA/RNA Molecule: Synthetic oligonucleotide
cuaacuagaauccuccaggtt

SEQ ID NO: 194 - DNA, 21 bp, Artificial Sequence
  Description of Artificial Sequence: Synthetic oligonucleotide
  Description of Combined DNA/RNA Molecule: Synthetic oligonucleotide
ccuggaggauucuaguuagtt

SEQ ID NO: 195 - DNA, 21 bp, Artificial Sequence
  Description of Artificial Sequence: Synthetic oligonucleotide
  Description of Combined DNA/RNA Molecule: Synthetic oligonucleotide
gaauaugcucauagagcaatt

SEQ ID NO: 196 - DNA, 21 bp, Artificial Sequence
  Description of Artificial Sequence: Synthetic oligonucleotide
  Description of Combined DNA/RNA Molecule: Synthetic oligonucleotide
uugcucuaugagcauauuctt

SEQ ID NO: 197 - DNA, 21 bp, Artificial Sequence
  Description of Artificial Sequence: Synthetic oligonucleotide
  Description of Combined DNA/RNA Molecule: Synthetic oligonucleotide
augcucauagagcaaagaatt

SEQ ID NO: 198 - DNA, 21 bp, Artificial Sequence
  Description of Artificial Sequence: Synthetic oligonucleotide
  Description of Combined DNA/RNA Molecule: Synthetic oligonucleotide
uucuuugcucuaugagcautt

SEQ ID NO: 199 - DNA, 21 bp, Artificial Sequence
  Description of Artificial Sequence: Synthetic oligonucleotide
  Description of Combined DNA/RNA Molecule: Synthetic oligonucleotide
aaaaauuggugcuguugagtt

SEQ ID NO: 200 - DNA, 21 bp, Artificial Sequence
  Description of Artificial Sequence: Synthetic oligonucleotide
  Description of Combined DNA/RNA Molecule: Synthetic oligonucleotide
cucaacagcaccaauuuuutt

SEQ ID NO: 201 - DNA, 21 bp, Artificial Sequence
  Description of Artificial Sequence: Synthetic oligonucleotide
  Description of Combined DNA/RNA Molecule: Synthetic oligonucleotide
gaggagcugaauaggguuatt

SEQ ID NO: 202 - DNA, 21 bp, Artificial Sequence
  Description of Artificial Sequence: Synthetic oligonucleotide
  Description of Combined DNA/RNA Molecule: Synthetic oligonucleotide
uaacccuauucagcuccuctt

SEQ ID NO: 203 - DNA, 21 bp, Artificial Sequence
  Description of Artificial Sequence: Synthetic oligonucleotide
  Description of Combined DNA/RNA Molecule: Synthetic oligonucleotide
ggagcugaauaggguuacatt

SEQ ID NO: 204 - DNA, 21 bp, Artificial Sequence
  Description of Artificial Sequence: Synthetic oligonucleotide
  Description of Combined DNA/RNA Molecule: Synthetic oligonucleotide
uguaacccuauucagcucctt

SEQ ID NO: 205 - DNA, 21 bp, Artificial Sequence
  Description of Artificial Sequence: Synthetic oligonucleotide
  Description of Combined DNA/RNA Molecule: Synthetic oligonucleotide
gagcugaauaggguuacagtt

SEQ ID NO: 206 - DNA, 21 bp, Artificial Sequence
  Description of Artificial Sequence: Synthetic oligonucleotide
  Description of Combined DNA/RNA Molecule: Synthetic oligonucleotide
cuguaacccuauucagcuctt

SEQ ID NO: 207 - DNA, 21 bp, Artificial Sequence
  Description of Artificial Sequence: Synthetic oligonucleotide
  Description of Combined DNA/RNA Molecule: Synthetic oligonucleotide
agcugaauaggguuacagatt

SEQ ID NO: 208 - DNA, 21 bp, Artificial Sequence
  Description of Artificial Sequence: Synthetic oligonucleotide
  Description of Combined DNA/RNA Molecule: Synthetic oligonucleotide
ucuguaacccuauucagcutt

SEQ ID NO: 209 - DNA, 21 bp, Artificial Sequence
  Description of Artificial Sequence: Synthetic oligonucleotide
  Description of Combined DNA/RNA Molecule: Synthetic oligonucleotide
gcugaauaggguuacagagtt

SEQ ID NO: 210 - DNA, 21 bp, Artificial Sequence
  Description of Artificial Sequence: Synthetic oligonucleotide
  Description of Combined DNA/RNA Molecule: Synthetic oligonucleotide
cucuguaacccuauucagctt

SEQ ID NO: 211 - DNA, 21 bp, Artificial Sequence
  Description of Artificial Sequence: Synthetic oligonucleotide
  Description of Combined DNA/RNA Molecule: Synthetic oligonucleotide
ccaaacuggaucguaagaatt

SEQ ID NO: 212 - DNA, 21 bp, Artificial Sequence
  Description of Artificial Sequence: Synthetic oligonucleotide
  Description of Combined DNA/RNA Molecule: Synthetic oligonucleotide
uucuuacgauccaguuuggtt

SEQ ID NO: 213 - DNA, 21 bp, Artificial Sequence
  Description of Artificial Sequence: Synthetic oligonucleotide
  Description of Combined DNA/RNA Molecule: Synthetic oligonucleotide
gaucguaagaaggcaguugtt

SEQ ID NO: 214 - DNA, 21 bp, Artificial Sequence
  Description of Artificial Sequence: Synthetic oligonucleotide
  Description of Combined DNA/RNA Molecule: Synthetic oligonucleotide
caacugccuucuuacgauctt

SEQ ID NO: 215 - DNA, 21 bp, Artificial Sequence
  Description of Artificial Sequence: Synthetic oligonucleotide
  Description of Combined DNA/RNA Molecule: Synthetic oligonucleotide
accuuauuugguaaucugctt

SEQ ID NO: 216 - DNA, 21 bp, Artificial Sequence
  Description of Artificial Sequence: Synthetic oligonucleotide
  Description of Combined DNA/RNA Molecule: Synthetic oligonucleotide
gcagauuaccaaauaaggutt

SEQ ID NO: 217 - DNA, 21 bp, Artificial Sequence
  Description of Artificial Sequence: Synthetic oligonucleotide
  Description of Combined DNA/RNA Molecule: Synthetic oligonucleotide
uuagauaccauuacuacagtt

SEQ ID NO: 218 - DNA, 21 bp, Artificial Sequence
  Description of Artificial Sequence: Synthetic oligonucleotide
  Description of Combined DNA/RNA Molecule: Synthetic oligonucleotide
cuguaguaaugguaucuaatt

SEQ ID NO: 219 - DNA, 21 bp, Artificial Sequence
  Description of Artificial Sequence: Synthetic oligonucleotide
  Description of Combined DNA/RNA Molecule: Synthetic oligonucleotide
auaccauuacuacaguagctt

SEQ ID NO: 220 - DNA, 21 bp, Artificial Sequence
  Description of Artificial Sequence: Synthetic oligonucleotide
  Description of Combined DNA/RNA Molecule: Synthetic oligonucleotide
gcuacuguaguaaugguautt

SEQ ID NO: 221 - DNA, 21 bp, Artificial Sequence
  Description of Artificial Sequence: Synthetic oligonucleotide
  Description of Combined DNA/RNA Molecule: Synthetic oligonucleotide
uacuacaguagcacuuggatt

SEQ ID NO: 222 - DNA, 21 bp, Artificial Sequence
  Description of Artificial Sequence: Synthetic oligonucleotide
  Description of Combined DNA/RNA Molecule: Synthetic oligonucleotide
uccaagugcuacuguaguatt

SEQ ID NO: 223 - DNA, 21 bp, Artificial Sequence
  Description of Artificial Sequence: Synthetic oligonucleotide
  Description of Combined DNA/RNA Molecule: Synthetic oligonucleotide
aaaguaaaacuguacuacatt

SEQ ID NO: 224 - DNA, 21 bp, Artificial Sequence
  Description of Artificial Sequence: Synthetic oligonucleotide
  Description of Combined DNA/RNA Molecule: Synthetic oligonucleotide
uguaguacaguuuuacuuutt

SEQ ID NO: 225 - DNA, 21 bp, Artificial Sequence
  Description of Artificial Sequence: Synthetic oligonucleotide
  Description of Combined DNA/RNA Molecule: Synthetic oligonucleotide
cucaagacugaucuucuaatt

SEQ ID NO: 226 - DNA, 21 bp, Artificial Sequence
  Description of Artificial Sequence: Synthetic oligonucleotide
  Description of Combined DNA/RNA Molecule: Synthetic oligonucleotide
uuagaagaucagucuugagtt

SEQ ID NO: 227 - DNA, 21 bp, Artificial Sequence
  Description of Artificial Sequence: Synthetic oligonucleotide
  Description of Combined DNA/RNA Molecule: Synthetic oligonucleotide
uugacaguggccgauaagatt

SEQ ID NO: 228 - DNA, 21 bp, Artificial Sequence
  Description of Artificial Sequence: Synthetic oligonucleotide
  Description of Combined DNA/RNA Molecule: Synthetic oligonucleotide
ucuuaucggccacugucaatt

SEQ ID NO: 229 - DNA, 21 bp, Artificial Sequence
  Description of Artificial Sequence: Synthetic oligonucleotide
  Description of Combined DNA/RNA Molecule: Synthetic oligonucleotide
ugacaguggccgauaagautt

SEQ ID NO: 230 - DNA, 21 bp, Artificial Sequence
  Description of Artificial Sequence: Synthetic oligonucleotide
  Description of Combined DNA/RNA Molecule: Synthetic oligonucleotide
aucuuaucggccacugucatt

SEQ ID NO: 231 - DNA, 21 bp, Artificial Sequence
  Description of Artificial Sequence: Synthetic oligonucleotide
  Description of Combined DNA/RNA Molecule: Synthetic oligonucleotide
gcaauguggaaaccuaacutt

SEQ ID NO: 232 - DNA, 21 bp, Artificial Sequence
  Description of Artificial Sequence: Synthetic oligonucleotide
  Description of Combined DNA/RNA Molecule: Synthetic oligonucleotide
aguuagguuuccacauugctt

SEQ ID NO: 233 - DNA, 21 bp, Artificial Sequence
  Description of Artificial Sequence: Synthetic oligonucleotide
  Description of Combined DNA/RNA Molecule: Synthetic oligonucleotide
ccacuuaguaguguccaggtt

SEQ ID NO: 234 - DNA, 21 bp, Artificial Sequence
  Description of Artificial Sequence: Synthetic oligonucleotide
  Description of Combined DNA/RNA Molecule: Synthetic oligonucleotide
ccuggacacuacuaaguggtt

SEQ ID NO: 235 - DNA, 21 bp, Artificial Sequence
  Description of Artificial Sequence: Synthetic oligonucleotide
  Description of Combined DNA/RNA Molecule: Synthetic oligonucleotide
agaagguacaaaauugguutt

SEQ ID NO: 236 - DNA, 21 bp, Artificial Sequence
  Description of Artificial Sequence: Synthetic oligonucleotide
  Description of Combined DNA/RNA Molecule: Synthetic oligonucleotide
aaccaauuuuguaccuucutt

SEQ ID NO: 237 - DNA, 21 bp, Artificial Sequence
  Description of Artificial Sequence: Synthetic oligonucleotide
  Description of Combined DNA/RNA Molecule: Synthetic oligonucleotide
ugguuugacuaagcuuaautt

SEQ ID NO: 238 - DNA, 21 bp, Artificial Sequence
  Description of Artificial Sequence: Synthetic oligonucleotide
  Description of Combined DNA/RNA Molecule: Synthetic oligonucleotide
auuaagcuuagucaaaccatt

SEQ ID NO: 239 - DNA, 21 bp, Artificial Sequence
  Description of Artificial Sequence: Synthetic oligonucleotide
  Description of Combined DNA/RNA Molecule: Synthetic oligonucleotide
gguuugacuaagcuuaauutt

SEQ ID NO: 240 - DNA, 21 bp, Artificial Sequence
  Description of Artificial Sequence: Synthetic oligonucleotide
  Description of Combined DNA/RNA Molecule: Synthetic oligonucleotide
aauuaagcuuagucaaacctt

SEQ ID NO: 241 - DNA, 21 bp, Artificial Sequence
  Description of Artificial Sequence: Synthetic oligonucleotide
  Description of Combined DNA/RNA Molecule: Synthetic oligonucleotide
ucuaagucaagagccaucutt

SEQ ID NO: 242 - DNA, 21 bp, Artificial Sequence
  Description of Artificial Sequence: Synthetic oligonucleotide
  Description of Combined DNA/RNA Molecule: Synthetic oligonucleotide
agauggcucuugacuuagatt

SEQ ID NO: 243 - DNA, 21 bp, Artificial Sequence
  Description of Artificial Sequence: Synthetic oligonucleotide
  Description of Combined DNA/RNA Molecule: Synthetic oligonucleotide
ucaucccuauaguucacuutt

SEQ ID NO: 244 - DNA, 21 bp, Artificial Sequence
  Description of Artificial Sequence: Synthetic oligonucleotide
  Description of Combined DNA/RNA Molecule: Synthetic oligonucleotide
aagugaacuauagggaugatt

SEQ ID NO: 245 - DNA, 21 bp, Artificial Sequence
  Description of Artificial Sequence: Synthetic oligonucleotide
  Description of Combined DNA/RNA Molecule: Synthetic oligonucleotide
caucccuauaguucacuuutt

SEQ ID NO: 246 - DNA, 21 bp, Artificial Sequence
  Description of Artificial Sequence: Synthetic oligonucleotide
  Description of Combined DNA/RNA Molecule: Synthetic oligonucleotide
aaagugaacuauagggaugtt

SEQ ID NO: 247 - DNA, 21 bp, Artificial Sequence
  Description of Artificial Sequence: Synthetic oligonucleotide
  Description of Combined DNA/RNA Molecule: Synthetic oligonucleotide
cccuagacuucccuauuuctt

SEQ ID NO: 248 - DNA, 21 bp, Artificial Sequence
  Description of Artificial Sequence: Synthetic oligonucleotide
  Description of Combined DNA/RNA Molecule: Synthetic oligonucleotide
gaaauagggaagucuagggtt

SEQ ID NO: 249 - DNA, 21 bp, Artificial Sequence
  Description of Artificial Sequence: Synthetic oligonucleotide
  Description of Combined DNA/RNA Molecule: Synthetic oligonucleotide
agacuucccuauuucgcuutt

SEQ ID NO: 250 - DNA, 21 bp, Artificial Sequence
  Description of Artificial Sequence: Synthetic oligonucleotide
  Description of Combined DNA/RNA Molecule: Synthetic oligonucleotide
aagcgaaauagggaagucutt

SEQ ID NO: 251 - DNA, 21 bp, Artificial Sequence
  Description of Artificial Sequence: Synthetic oligonucleotide
  Description of Combined DNA/RNA Molecule: Synthetic oligonucleotide
ucaccaaaccauuuguagatt

SEQ ID NO: 252 - DNA, 21 bp, Artificial Sequence
  Description of Artificial Sequence: Synthetic oligonucleotide
  Description of Combined DNA/RNA Molecule: Synthetic oligonucleotide
ucuacaaaugguuuggugatt

SEQ ID NO: 253 - DNA, 21 bp, Artificial Sequence
  Description of Artificial Sequence: Synthetic oligonucleotide
  Description of Combined DNA/RNA Molecule: Synthetic oligonucleotide
uccuuuaagaggccuaacutt

SEQ ID NO: 254 - DNA, 21 bp, Artificial Sequence
  Description of Artificial Sequence: Synthetic oligonucleotide
  Description of Combined DNA/RNA Molecule: Synthetic oligonucleotide
aguuaggccucuuaaaggatt

SEQ ID NO: 255 - DNA, 21 bp, Artificial Sequence
  Description of Artificial Sequence: Synthetic oligonucleotide
  Description of Combined DNA/RNA Molecule: Synthetic oligonucleotide
uuuaagaggccuaacucautt

SEQ ID NO: 256 - DNA, 21 bp, Artificial Sequence
  Description of Artificial Sequence: Synthetic oligonucleotide
  Description of Combined DNA/RNA Molecule: Synthetic oligonucleotide
augaguuaggccucuuaaatt

SEQ ID NO: 257 - DNA, 21 bp, Artificial Sequence
  Description of Artificial Sequence: Synthetic oligonucleotide
  Description of Combined DNA/RNA Molecule: Synthetic oligonucleotide
uuaagaggccuaacucauutt

SEQ ID NO: 258 - DNA, 21 bp, Artificial Sequence
  Description of Artificial Sequence: Synthetic oligonucleotide
  Description of Combined DNA/RNA Molecule: Synthetic oligonucleotide
aaugaguuaggccucuuaatt

SEQ ID NO: 259 - DNA, 21 bp, Artificial Sequence
  Description of Artificial Sequence: Synthetic oligonucleotide
  Description of Combined DNA/RNA Molecule: Synthetic oligonucleotide
ggccuaacucauucacccutt

SEQ ID NO: 260 - DNA, 21 bp, Artificial Sequence
  Description of Artificial Sequence: Synthetic oligonucleotide
  Description of Combined DNA/RNA Molecule: Synthetic oligonucleotide
agggugaaugaguuaggcctt

SEQ ID NO: 261 - DNA, 21 bp, Artificial Sequence
  Description of Artificial Sequence: Synthetic oligonucleotide
  Description of Combined DNA/RNA Molecule: Synthetic oligonucleotide
ugguauuuuugaucuggcatt

SEQ ID NO: 262 - DNA, 21 bp, Artificial Sequence
  Description of Artificial Sequence: Synthetic oligonucleotide
  Description of Combined DNA/RNA Molecule: Synthetic oligonucleotide
ugccagaucaaaaauaccatt

SEQ ID NO: 263 - DNA, 21 bp, Artificial Sequence
  Description of Artificial Sequence: Synthetic oligonucleotide
  Description of Combined DNA/RNA Molecule: Synthetic oligonucleotide
aguuuaguguguaaaguuutt

SEQ ID NO: 264 - DNA, 21 bp, Artificial Sequence
  Description of Artificial Sequence: Synthetic oligonucleotide
  Description of Combined DNA/RNA Molecule: Synthetic oligonucleotide
aaacuuuacacacuaaacutt

SEQ ID NO: 265 - DNA, 21 bp, Artificial Sequence
  Description of Artificial Sequence: Synthetic oligonucleotide
  Description of Combined DNA/RNA Molecule: Synthetic oligonucleotide
gccaaauucgucugcgaagtt

SEQ ID NO: 266 - DNA, 21 bp, Artificial Sequence
  Description of Artificial Sequence: Synthetic oligonucleotide
  Description of Combined DNA/RNA Molecule: Synthetic oligonucleotide
cuucgcagacgaauuuggctt

SEQ ID NO: 267 - DNA, 21 bp, Artificial Sequence
  Description of Artificial Sequence: Synthetic oligonucleotide
  Description of Combined DNA/RNA Molecule: Synthetic oligonucleotide
aauucgucugcgaagaagatt

SEQ ID NO: 268 - DNA, 21 bp, Artificial Sequence
  Description of Artificial Sequence: Synthetic oligonucleotide
  Description of Combined DNA/RNA Molecule: Synthetic oligonucleotide
ucuucuucgcagacgaauutt

SEQ ID NO: 269 - DNA, 21 bp, Artificial Sequence
  Description of Artificial Sequence: Synthetic oligonucleotide
  Description of Combined DNA/RNA Molecule: Synthetic oligonucleotide
ugaaaggucaccuaaugaatt

SEQ ID NO: 270 - DNA, 21 bp, Artificial Sequence
  Description of Artificial Sequence: Synthetic oligonucleotide
  Description of Combined DNA/RNA Molecule: Synthetic oligonucleotide
uucauuaggugaccuuucatt

SEQ ID NO: 271 - DNA, 21 bp, Artificial Sequence
  Description of Artificial Sequence: Synthetic oligonucleotide
  Description of Combined DNA/RNA Molecule: Synthetic oligonucleotide
cagaccauuuaauuuggcatt

SEQ ID NO: 272 - DNA, 21 bp, Artificial Sequence
  Description of Artificial Sequence: Synthetic oligonucleotide
  Description of Combined DNA/RNA Molecule: Synthetic oligonucleotide
ugccaaauuaaauggucugtt

SEQ ID NO: 273 - DNA, 21 bp, Artificial Sequence
  Description of Artificial Sequence: Synthetic oligonucleotide
  Description of Combined DNA/RNA Molecule: Synthetic oligonucleotide
agaccauuuaauuuggcagtt

SEQ ID NO: 274 - DNA, 21 bp, Artificial Sequence
  Description of Artificial Sequence: Synthetic oligonucleotide
  Description of Combined DNA/RNA Molecule: Synthetic oligonucleotide
cugccaaauuaaauggucutt

SEQ ID NO: 275 - DNA, 21 bp, Artificial Sequence
  Description of Artificial Sequence: Synthetic oligonucleotide
  Description of Combined DNA/RNA Molecule: Synthetic oligonucleotide
aguuauuaugggcuauaautt

SEQ ID NO: 276 - DNA, 21 bp, Artificial Sequence
  Description of Artificial Sequence: Synthetic oligonucleotide
  Description of Combined DNA/RNA Molecule: Synthetic oligonucleotide
auuauagcccauaauaacutt

SEQ ID NO: 277 - DNA, 21 bp, Artificial Sequence
  Description of Artificial Sequence: Synthetic oligonucleotide
  Description of Combined DNA/RNA Molecule: Synthetic oligonucleotide
gcugguauaauuccacguatt

SEQ ID NO: 278 - DNA, 21 bp, Artificial Sequence
  Description of Artificial Sequence: Synthetic oligonucleotide
  Description of Combined DNA/RNA Molecule: Synthetic oligonucleotide
uacguggaauuauaccagctt

SEQ ID NO: 279 - DNA, 21 bp, Artificial Sequence
  Description of Artificial Sequence: Synthetic oligonucleotide
  Description of Combined DNA/RNA Molecule: Synthetic oligonucleotide
auuuaauuuggcagagcggtt

SEQ ID NO: 280 - DNA, 21 bp, Artificial Sequence
  Description of Artificial Sequence: Synthetic oligonucleotide
  Description of Combined DNA/RNA Molecule: Synthetic oligonucleotide
ccgcucugccaaauuaaautt

SEQ ID NO: 281 - DNA, 21 bp, Artificial Sequence
  Description of Artificial Sequence: Synthetic oligonucleotide
  Description of Combined DNA/RNA Molecule: Synthetic oligonucleotide
uuuaauuuggcagagcggatt

SEQ ID NO: 282 - DNA, 21 bp, Artificial Sequence
  Description of Artificial Sequence: Synthetic oligonucleotide
  Description of Combined DNA/RNA Molecule: Synthetic oligonucleotide
uccgcucugccaaauuaaatt

SEQ ID NO: 283 - DNA, 21 bp, Artificial Sequence
  Description of Artificial Sequence: Synthetic oligonucleotide
  Description of Combined DNA/RNA Molecule: Synthetic oligonucleotide
uuuggcagagcggaaagcutt

SEQ ID NO: 284 - DNA, 21 bp, Artificial Sequence
  Description of Artificial Sequence: Synthetic oligonucleotide
  Description of Combined DNA/RNA Molecule: Synthetic oligonucleotide
agcuuuccgcucugccaaatt

SEQ ID NO: 285 - DNA, 21 bp, Artificial Sequence
  Description of Artificial Sequence: Synthetic oligonucleotide
  Description of Combined DNA/RNA Molecule: Synthetic oligonucleotide
uuuuacaauggaaggugaatt

SEQ ID NO: 286 - DNA, 21 bp, Artificial Sequence
  Description of Artificial Sequence: Synthetic oligonucleotide
  Description of Combined DNA/RNA Molecule: Synthetic oligonucleotide
uucaccuuccauuguaaaatt

SEQ ID NO: 287 - DNA, 21 bp, Artificial Sequence
  Description of Artificial Sequence: Synthetic oligonucleotide
  Description of Combined DNA/RNA Molecule: Synthetic oligonucleotide
aauggaaggugaaaggucatt

SEQ ID NO: 288 - DNA, 21 bp, Artificial Sequence
  Description of Artificial Sequence: Synthetic oligonucleotide
  Description of Combined DNA/RNA Molecule: Synthetic oligonucleotide
ugaccuuucaccuuccauutt

SEQ ID NO: 289 - DNA, 21 bp, Artificial Sequence
  Description of Artificial Sequence: Synthetic oligonucleotide
  Description of Combined DNA/RNA Molecule: Synthetic oligonucleotide
ugagaugcagaccauuuaatt

SEQ ID NO: 290 - DNA, 21 bp, Artificial Sequence
  Description of Artificial Sequence: Synthetic oligonucleotide
  Description of Combined DNA/RNA Molecule: Synthetic oligonucleotide
uuaaauggucugcaucucatt

SEQ ID NO: 291 - DNA, 21 bp, Artificial Sequence
  Description of Artificial Sequence: Synthetic oligonucleotide
  Description of Combined DNA/RNA Molecule: Synthetic oligonucleotide
ucgcagccaaauucgucugtt

SEQ ID NO: 292 - DNA, 21 bp, Artificial Sequence
  Description of Artificial Sequence: Synthetic oligonucleotide
  Description of Combined DNA/RNA Molecule: Synthetic oligonucleotide
cagacgaauuuggcugcgatt

SEQ ID NO: 293 - DNA, 21 bp, Artificial Sequence
  Description of Artificial Sequence: Synthetic oligonucleotide
  Description of Combined DNA/RNA Molecule: Synthetic oligonucleotide
ggcuauaauugcacuaucutt

SEQ ID NO: 294 - DNA, 21 bp, Artificial Sequence
  Description of Artificial Sequence: Synthetic oligonucleotide
  Description of Combined DNA/RNA Molecule: Synthetic oligonucleotide
agauagugcaauuauagcctt

SEQ ID NO: 295 - DNA, 21 bp, Artificial Sequence
  Description of Artificial Sequence: Synthetic oligonucleotide
  Description of Combined DNA/RNA Molecule: Synthetic oligonucleotide
auugacaguggccgauaagtt

SEQ ID NO: 296 - DNA, 21 bp, Artificial Sequence
  Description of Artificial Sequence: Synthetic oligonucleotide
  Description of Combined DNA/RNA Molecule: Synthetic oligonucleotide
cuuaucggccacugucaautt

SEQ ID NO: 297 - DNA, 21 bp, Artificial Sequence
  Description of Artificial Sequence: Synthetic oligonucleotide
  Description of Combined DNA/RNA Molecule: Synthetic oligonucleotide
cuagacuucccuauuucgctt

SEQ ID NO: 298 - DNA, 21 bp, Artificial Sequence
  Description of Artificial Sequence: Synthetic oligonucleotide
  Description of Combined DNA/RNA Molecule: Synthetic oligonucleotide
gcgaaauagggaagucuagtt

SEQ ID NO: 299 - DNA, 21 bp, Artificial Sequence
  Description of Artificial Sequence: Synthetic oligonucleotide
  Description of Combined DNA/RNA Molecule: Synthetic oligonucleotide
acuaucuuugcguauggcctt

SEQ ID NO: 300 - DNA, 21 bp, Artificial Sequence
  Description of Artificial Sequence: Synthetic oligonucleotide
  Description of Combined DNA/RNA Molecule: Synthetic oligonucleotide
ggccauacgcaaagauagutt

SEQ ID NO: 301 - DNA, 21 bp, Artificial Sequence
  Description of Artificial Sequence: Synthetic oligonucleotide
  Description of Combined DNA/RNA Molecule: Synthetic oligonucleotide
auacucuagucguucccactt

SEQ ID NO: 302 - DNA, 21 bp, Artificial Sequence
  Description of Artificial Sequence: Synthetic oligonucleotide
  Description of Combined DNA/RNA Molecule: Synthetic oligonucleotide
gugggaacgacuagaguautt

SEQ ID NO: 303 - DNA, 21 bp, Artificial Sequence
  Description of Artificial Sequence: Synthetic oligonucleotide
  Description of Combined DNA/RNA Molecule: Synthetic oligonucleotide
aaagaaacuacgauugaugtt

SEQ ID NO: 304 - DNA, 21 bp, Artificial Sequence
  Description of Artificial Sequence: Synthetic oligonucleotide
  Description of Combined DNA/RNA Molecule: Synthetic oligonucleotide
caucaaucguaguuucuuutt

SEQ ID NO: 305 - DNA, 21 bp, Artificial Sequence
  Description of Artificial Sequence: Synthetic oligonucleotide
  Description of Combined DNA/RNA Molecule: Synthetic oligonucleotide
gccuugauuuuuuggcgggtt

SEQ ID NO: 306 - DNA, 21 bp, Artificial Sequence
  Description of Artificial Sequence: Synthetic oligonucleotide
  Description of Combined DNA/RNA Molecule: Synthetic oligonucleotide
cccgccaaaaaaucaaggctt

SEQ ID NO: 307 - DNA, 21 bp, Artificial Sequence
  Description of Artificial Sequence: Synthetic oligonucleotide
  Description of Combined DNA/RNA Molecule: Synthetic oligonucleotide
cgcccauucaauaguagaatt

SEQ ID NO: 308 - DNA, 21 bp, Artificial Sequence
  Description of Artificial Sequence: Synthetic oligonucleotide
  Description of Combined DNA/RNA Molecule: Synthetic oligonucleotide
uucuacuauugaaugggcgtt

SEQ ID NO: 309 - DNA, 21 bp, Artificial Sequence
  Description of Artificial Sequence: Synthetic oligonucleotide
  Description of Combined DNA/RNA Molecule: Synthetic oligonucleotide
ccuuauuugguaaucugcutt

SEQ ID NO: 310 - DNA, 21 bp, Artificial Sequence
  Description of Artificial Sequence: Synthetic oligonucleotide
  Description of Combined DNA/RNA Molecule: Synthetic oligonucleotide
agcagauuaccaaauaaggtt

SEQ ID NO: 311 - DNA, 21 bp, Artificial Sequence
  Description of Artificial Sequence: Synthetic oligonucleotide
  Description of Combined DNA/RNA Molecule: Synthetic oligonucleotide
agagacaauuccggaugugtt

SEQ ID NO: 312 - DNA, 21 bp, Artificial Sequence
  Description of Artificial Sequence: Synthetic oligonucleotide
  Description of Combined DNA/RNA Molecule: Synthetic oligonucleotide
cacauccggaauugucucutt

SEQ ID NO: 313 - DNA, 21 bp, Artificial Sequence
  Description of Artificial Sequence: Synthetic oligonucleotide
  Description of Combined DNA/RNA Molecule: Synthetic oligonucleotide
ugacuuugauagcuaaauutt

SEQ ID NO: 314 - DNA, 21 bp, Artificial Sequence
  Description of Artificial Sequence: Synthetic oligonucleotide
  Description of Combined DNA/RNA Molecule: Synthetic oligonucleotide
aauuuagcuaucaaagucatt

SEQ ID NO: 315 - DNA, 21 bp, Artificial Sequence
  Description of Artificial Sequence: Synthetic oligonucleotide
  Description of Combined DNA/RNA Molecule: Synthetic oligonucleotide
uggcagagcggaaagcuagtt

SEQ ID NO: 316 - DNA, 21 bp, Artificial Sequence
  Description of Artificial Sequence: Synthetic oligonucleotide
  Description of Combined DNA/RNA Molecule: Synthetic oligonucleotide
cuagcuuuccgcucugccatt

SEQ ID NO: 317 - DNA, 21 bp, Artificial Sequence
  Description of Artificial Sequence: Synthetic oligonucleotide
  Description of Combined DNA/RNA Molecule: Synthetic oligonucleotide
gagcggaaagcuagcgccctt

SEQ ID NO: 318 - DNA, 21 bp, Artificial Sequence
  Description of Artificial Sequence: Synthetic oligonucleotide
  Description of Combined DNA/RNA Molecule: Synthetic oligonucleotide
gggcgcuagcuuuccgcuctt

SEQ ID NO: 319 - DNA, 21 bp, Artificial Sequence
  Description of Artificial Sequence: Synthetic oligonucleotide
  Description of Combined DNA/RNA Molecule: Synthetic oligonucleotide
aaagaaguuaguguacgaatt

SEQ ID NO: 320 - DNA, 21 bp, Artificial Sequence
  Description of Artificial Sequence: Synthetic oligonucleotide
  Description of Combined DNA/RNA Molecule: Synthetic oligonucleotide
uucguacacuaacuucuuutt

SEQ ID NO: 321 - DNA, 21 bp, Artificial Sequence
  Description of Artificial Sequence: Synthetic oligonucleotide
  Description of Combined DNA/RNA Molecule: Synthetic oligonucleotide
auugcacuaucuuugcguatt

SEQ ID NO: 322 - DNA, 21 bp, Artificial Sequence
  Description of Artificial Sequence: Synthetic oligonucleotide
  Description of Combined DNA/RNA Molecule: Synthetic oligonucleotide
uacgcaaagauagugcaautt

SEQ ID NO: 323 - DNA, 21 bp, Artificial Sequence
  Description of Artificial Sequence: Synthetic oligonucleotide
  Description of Combined DNA/RNA Molecule: Synthetic oligonucleotide
gguauaauuccacguaccctt

SEQ ID NO: 324 - DNA, 21 bp, Artificial Sequence
  Description of Artificial Sequence: Synthetic oligonucleotide
  Description of Combined DNA/RNA Molecule: Synthetic oligonucleotide
ggguacguggaauuauacctt

SEQ ID NO: 325 - DNA, 21 bp, Artificial Sequence
  Description of Artificial Sequence: Synthetic oligonucleotide
  Description of Combined DNA/RNA Molecule: Synthetic oligonucleotide
uacucuagucguucccacutt

SEQ ID NO: 326 - DNA, 21 bp, Artificial Sequence
  Description of Artificial Sequence: Synthetic oligonucleotide
  Description of Combined DNA/RNA Molecule: Synthetic oligonucleotide
agugggaacgacuagaguatt

SEQ ID NO: 327 - DNA, 21 bp, Artificial Sequence
  Description of Artificial Sequence: Synthetic oligonucleotide
  Description of Combined DNA/RNA Molecule: Synthetic oligonucleotide
uaugaaagaaacuacgauutt

SEQ ID NO: 328 - DNA, 21 bp, Artificial Sequence
  Description of Artificial Sequence: Synthetic oligonucleotide
  Description of Combined DNA/RNA Molecule: Synthetic oligonucleotide
aaucguaguuucuuucauatt

SEQ ID NO: 329 - DNA, 21 bp, Artificial Sequence
  Description of Artificial Sequence: Synthetic oligonucleotide
  Description of Combined DNA/RNA Molecule: Synthetic oligonucleotide
augcuagaaguacauaagatt

SEQ ID NO: 330 - DNA, 21 bp, Artificial Sequence
  Description of Artificial Sequence: Synthetic oligonucleotide
  Description of Combined DNA/RNA Molecule: Synthetic oligonucleotide
ucuuauguacuucuagcautt

SEQ ID NO: 331 - DNA, 21 bp, Artificial Sequence
  Description of Artificial Sequence: Synthetic oligonucleotide
  Description of Combined DNA/RNA Molecule: Synthetic oligonucleotide
aaguacauaagaccuuauutt

SEQ ID NO: 332 - DNA, 21 bp, Artificial Sequence
  Description of Artificial Sequence: Synthetic oligonucleotide
  Description of Combined DNA/RNA Molecule: Synthetic oligonucleotide
aauaaggucuuauguacuutt

SEQ ID NO: 333 - DNA, 21 bp, Artificial Sequence
  Description of Artificial Sequence: Synthetic oligonucleotide
  Description of Combined DNA/RNA Molecule: Synthetic oligonucleotide
acagccugagcuguuaaugtt

SEQ ID NO: 334 - DNA, 21 bp, Artificial Sequence
  Description of Artificial Sequence: Synthetic oligonucleotide
  Description of Combined DNA/RNA Molecule: Synthetic oligonucleotide
cauuaacagcucaggcugutt

SEQ ID NO: 335 - DNA, 21 bp, Artificial Sequence
  Description of Artificial Sequence: Synthetic oligonucleotide
  Description of Combined DNA/RNA Molecule: Synthetic oligonucleotide
aaagaagagacaauuccggtt

SEQ ID NO: 336 - DNA, 21 bp, Artificial Sequence
  Description of Artificial Sequence: Synthetic oligonucleotide
  Description of Combined DNA/RNA Molecule: Synthetic oligonucleotide
ccggaauugucucuucuuutt

SEQ ID NO: 337 - DNA, 21 bp, Artificial Sequence
  Description of Artificial Sequence: Synthetic oligonucleotide
  Description of Combined DNA/RNA Molecule: Synthetic oligonucleotide
cacacuggagaggucuaaatt

SEQ ID NO: 338 - DNA, 21 bp, Artificial Sequence
  Description of Artificial Sequence: Synthetic oligonucleotide
  Description of Combined DNA/RNA Molecule: Synthetic oligonucleotide
uuuagaccucuccagugugtt

SEQ ID NO: 339 - DNA, 21 bp, Artificial Sequence
  Description of Artificial Sequence: Synthetic oligonucleotide
  Description of Combined DNA/RNA Molecule: Synthetic oligonucleotide
cacuggagaggucuaaagutt

SEQ ID NO: 340 - DNA, 21 bp, Artificial Sequence
  Description of Artificial Sequence: Synthetic oligonucleotide
  Description of Combined DNA/RNA Molecule: Synthetic oligonucleotide
acuuuagaccucuccagugtt

SEQ ID NO: 341 - DNA, 21 bp, Artificial Sequence
  Description of Artificial Sequence: Synthetic oligonucleotide
  Description of Combined DNA/RNA Molecule: Synthetic oligonucleotide
acuggagaggucuaaagugtt

SEQ ID NO: 342 - DNA, 21 bp, Artificial Sequence
  Description of Artificial Sequence: Synthetic oligonucleotide
  Description of Combined DNA/RNA Molecule: Synthetic oligonucleotide
cacuuuagaccucuccagutt

SEQ ID NO: 343 - DNA, 21 bp, Artificial Sequence
  Description of Artificial Sequence: Synthetic oligonucleotide
  Description of Combined DNA/RNA Molecule: Synthetic oligonucleotide
cgucgcagccaaauucguctt

SEQ ID NO: 344 - DNA, 21 bp, Artificial Sequence
  Description of Artificial Sequence: Synthetic oligonucleotide
  Description of Combined DNA/RNA Molecule: Synthetic oligonucleotide
gacgaauuuggcugcgacgtt

SEQ ID NO: 345 - DNA, 21 bp, Artificial Sequence
  Description of Artificial Sequence: Synthetic oligonucleotide
  Description of Combined DNA/RNA Molecule: Synthetic oligonucleotide
gaaggcaguugaccaacactt

SEQ ID NO: 346 - DNA, 21 bp, Artificial Sequence
  Description of Artificial Sequence: Synthetic oligonucleotide
  Description of Combined DNA/RNA Molecule: Synthetic oligonucleotide
guguuggucaacugccuuctt

SEQ ID NO: 347 - DNA, 21 bp, Artificial Sequence
  Description of Artificial Sequence: Synthetic oligonucleotide
  Description of Combined DNA/RNA Molecule: Synthetic oligonucleotide
cauucacccugacagaguutt

SEQ ID NO: 348 - DNA, 21 bp, Artificial Sequence
  Description of Artificial Sequence: Synthetic oligonucleotide
  Description of Combined DNA/RNA Molecule: Synthetic oligonucleotide
aacucugucagggugaaugtt

SEQ ID NO: 349 - DNA, 21 bp, Artificial Sequence
  Description of Artificial Sequence: Synthetic oligonucleotide
  Description of Combined DNA/RNA Molecule: Synthetic oligonucleotide
aagaggccuaacucauucatt

SEQ ID NO: 350 - DNA, 21 bp, Artificial Sequence
  Description of Artificial Sequence: Synthetic oligonucleotide
  Description of Combined DNA/RNA Molecule: Synthetic oligonucleotide
ugaaugaguuaggccucuutt

SEQ ID NO: 351 - DNA, 21 bp, Artificial Sequence
  Description of Artificial Sequence: Synthetic oligonucleotide
  Description of Combined DNA/RNA Molecule: Synthetic oligonucleotide
gagacaauuccggauguggtt

SEQ ID NO: 352 - DNA, 21 bp, Artificial Sequence
  Description of Artificial Sequence: Synthetic oligonucleotide
  Description of Combined DNA/RNA Molecule: Synthetic oligonucleotide
ccacauccggaauugucuctt

SEQ ID NO: 353 - DNA, 21 bp, Artificial Sequence
  Description of Artificial Sequence: Synthetic oligonucleotide
  Description of Combined DNA/RNA Molecule: Synthetic oligonucleotide
uuccggauguggauguagatt

SEQ ID NO: 354 - DNA, 21 bp, Artificial Sequence
  Description of Artificial Sequence: Synthetic oligonucleotide
  Description of Combined DNA/RNA Molecule: Synthetic oligonucleotide
ucuacauccacauccggaatt

SEQ ID NO: 355 - DNA, 21 bp, Artificial Sequence
  Description of Artificial Sequence: Synthetic oligonucleotide
  Description of Combined DNA/RNA Molecule: Synthetic oligonucleotide
aagcuagcgcccauucaautt

SEQ ID NO: 356 - DNA, 21 bp, Artificial Sequence
  Description of Artificial Sequence: Synthetic oligonucleotide
  Description of Combined DNA/RNA Molecule: Synthetic oligonucleotide
auugaaugggcgcuagcuutt

SEQ ID NO: 357 - DNA, 21 bp, Artificial Sequence
  Description of Artificial Sequence: Synthetic oligonucleotide
  Description of Combined DNA/RNA Molecule: Synthetic oligonucleotide
gaaguuaguguacgaacugtt

SEQ ID NO: 358 - DNA, 21 bp, Artificial Sequence
  Description of Artificial Sequence: Synthetic oligonucleotide
  Description of Combined DNA/RNA Molecule: Synthetic oligonucleotide
caguucguacacuaacuuctt

SEQ ID NO: 359 - DNA, 21 bp, Artificial Sequence
  Description of Artificial Sequence: Synthetic oligonucleotide
  Description of Combined DNA/RNA Molecule: Synthetic oligonucleotide
uauaauuccacguacccuutt

SEQ ID NO: 360 - DNA, 21 bp, Artificial Sequence
  Description of Artificial Sequence: Synthetic oligonucleotide
  Description of Combined DNA/RNA Molecule: Synthetic oligonucleotide
aaggguacguggaauuauatt

SEQ ID NO: 361 - DNA, 21 bp, Artificial Sequence
  Description of Artificial Sequence: Synthetic oligonucleotide
  Description of Combined DNA/RNA Molecule: Synthetic oligonucleotide
acaguggccgauaagauagtt

SEQ ID NO: 362 - DNA, 21 bp, Artificial Sequence
  Description of Artificial Sequence: Synthetic oligonucleotide
  Description of Combined DNA/RNA Molecule: Synthetic oligonucleotide
cuaucuuaucggccacugutt

SEQ ID NO: 363 - DNA, 21 bp, Artificial Sequence
  Description of Artificial Sequence: Synthetic oligonucleotide
  Description of Combined DNA/RNA Molecule: Synthetic oligonucleotide
ucugucaucccuauaguuctt

SEQ ID NO: 364 - DNA, 21 bp, Artificial Sequence
  Description of Artificial Sequence: Synthetic oligonucleotide
  Description of Combined DNA/RNA Molecule: Synthetic oligonucleotide
gaacuauagggaugacagatt

SEQ ID NO: 365 - DNA, 21 bp, Artificial Sequence
  Description of Artificial Sequence: Synthetic oligonucleotide
  Description of Combined DNA/RNA Molecule: Synthetic oligonucleotide
uucuugcuaugacuugugutt

SEQ ID NO: 366 - DNA, 21 bp, Artificial Sequence
  Description of Artificial Sequence: Synthetic oligonucleotide
  Description of Combined DNA/RNA Molecule: Synthetic oligonucleotide
acacaagucauagcaagaatt

SEQ ID NO: 367 - DNA, 21 bp, Artificial Sequence
  Description of Artificial Sequence: Synthetic oligonucleotide
  Description of Combined DNA/RNA Molecule: Synthetic oligonucleotide
guaagaaggcaguugaccatt

SEQ ID NO: 368 - DNA, 21 bp, Artificial Sequence
  Description of Artificial Sequence: Synthetic oligonucleotide
  Description of Combined DNA/RNA Molecule: Synthetic oligonucleotide
uggucaacugccuucuuactt

SEQ ID NO: 369 - DNA, 21 bp, Artificial Sequence
  Description of Artificial Sequence: Synthetic oligonucleotide
  Description of Combined DNA/RNA Molecule: Synthetic oligonucleotide
cauugacaguggccgauaatt

SEQ ID NO: 370 - DNA, 21 bp, Artificial Sequence
  Description of Artificial Sequence: Synthetic oligonucleotide
  Description of Combined DNA/RNA Molecule: Synthetic oligonucleotide
uuaucggccacugucaaugtt

SEQ ID NO: 371 - DNA, 21 bp, Artificial Sequence
  Description of Artificial Sequence: Synthetic oligonucleotide
  Description of Combined DNA/RNA Molecule: Synthetic oligonucleotide
agaaaccacuuaguagugutt

SEQ ID NO: 372 - DNA, 21 bp, Artificial Sequence
  Description of Artificial Sequence: Synthetic oligonucleotide
  Description of Combined DNA/RNA Molecule: Synthetic oligonucleotide
acacuacuaagugguuucutt

SEQ ID NO: 373 - DNA, 21 bp, Artificial Sequence
  Description of Artificial Sequence: Synthetic oligonucleotide
  Description of Combined DNA/RNA Molecule: Synthetic oligonucleotide
ggauuguucaucaauuggctt

SEQ ID NO: 374 - DNA, 21 bp, Artificial Sequence
  Description of Artificial Sequence: Synthetic oligonucleotide
  Description of Combined DNA/RNA Molecule: Synthetic oligonucleotide
gccaauugaugaacaaucctt

SEQ ID NO: 375 - DNA, 21 bp, Artificial Sequence
  Description of Artificial Sequence: Synthetic oligonucleotide
  Description of Combined DNA/RNA Molecule: Synthetic oligonucleotide
uaagaggccuaacucauuctt

SEQ ID NO: 376 - DNA, 21 bp, Artificial Sequence
  Description of Artificial Sequence: Synthetic oligonucleotide
  Description of Combined DNA/RNA Molecule: Synthetic oligonucleotide
gaaugaguuaggccucuuatt

SEQ ID NO: 377 - DNA, 21 bp, Artificial Sequence
  Description of Artificial Sequence: Synthetic oligonucleotide
  Description of Combined DNA/RNA Molecule: Synthetic oligonucleotide
aguuaguguacgaacuggatt

SEQ ID NO: 378 - DNA, 21 bp, Artificial Sequence
  Description of Artificial Sequence: Synthetic oligonucleotide
  Description of Combined DNA/RNA Molecule: Synthetic oligonucleotide
uccaguucguacacuaacutt

SEQ ID NO: 379 - DNA, 21 bp, Artificial Sequence
  Description of Artificial Sequence: Synthetic oligonucleotide
  Description of Combined DNA/RNA Molecule: Synthetic oligonucleotide
aguacauaagaccuuauuutt

SEQ ID NO: 380 - DNA, 21 bp, Artificial Sequence
  Description of Artificial Sequence: Synthetic oligonucleotide
  Description of Combined DNA/RNA Molecule: Synthetic oligonucleotide
aaauaaggucuuauguacutt

SEQ ID NO: 381 - DNA, 21 bp, Artificial Sequence
  Description of Artificial Sequence: Synthetic oligonucleotide
  Description of Combined DNA/RNA Molecule: Synthetic oligonucleotide
ugagccuuguguauagauutt

SEQ ID NO: 382 - DNA, 21 bp, Artificial Sequence
  Description of Artificial Sequence: Synthetic oligonucleotide
  Description of Combined DNA/RNA Molecule: Synthetic oligonucleotide
aaucuauacacaaggcucatt

SEQ ID NO: 383 - DNA, 21 bp, Artificial Sequence
  Description of Artificial Sequence: Synthetic oligonucleotide
  Description of Combined DNA/RNA Molecule: Synthetic oligonucleotide
ccuuuaagaggccuaacuctt

SEQ ID NO: 384 - DNA, 21 bp, Artificial Sequence
  Description of Artificial Sequence: Synthetic oligonucleotide
  Description of Combined DNA/RNA Molecule: Synthetic oligonucleotide
gaguuaggccucuuaaaggtt

SEQ ID NO: 385 - DNA, 21 bp, Artificial Sequence
  Description of Artificial Sequence: Synthetic oligonucleotide
  Description of Combined DNA/RNA Molecule: Synthetic oligonucleotide
accacuuaguaguguccagtt

SEQ ID NO: 386 - DNA, 21 bp, Artificial Sequence
  Description of Artificial Sequence: Synthetic oligonucleotide
  Description of Combined DNA/RNA Molecule: Synthetic oligonucleotide
cuggacacuacuaaguggutt

SEQ ID NO: 387 - DNA, 21 bp, Artificial Sequence
  Description of Artificial Sequence: Synthetic oligonucleotide
  Description of Combined DNA/RNA Molecule: Synthetic oligonucleotide
gaaacuuccaauuaugucutt

SEQ ID NO: 388 - DNA, 21 bp, Artificial Sequence
  Description of Artificial Sequence: Synthetic oligonucleotide
  Description of Combined DNA/RNA Molecule: Synthetic oligonucleotide
agacauaauuggaaguuuctt

SEQ ID NO: 389 - DNA, 21 bp, Artificial Sequence
  Description of Artificial Sequence: Synthetic oligonucleotide
  Description of Combined DNA/RNA Molecule: Synthetic oligonucleotide
ugcauacucuagucguucctt

SEQ ID NO: 390 - DNA, 21 bp, Artificial Sequence
  Description of Artificial Sequence: Synthetic oligonucleotide
  Description of Combined DNA/RNA Molecule: Synthetic oligonucleotide
ggaacgacuagaguaugcatt

SEQ ID NO: 391 - DNA, 21 bp, Artificial Sequence
  Description of Artificial Sequence: Synthetic oligonucleotide
  Description of Combined DNA/RNA Molecule: Synthetic oligonucleotide
agaaggcaguugaccaacatt

SEQ ID NO: 392 - DNA, 21 bp, Artificial Sequence
  Description of Artificial Sequence: Synthetic oligonucleotide
  Description of Combined DNA/RNA Molecule: Synthetic oligonucleotide
uguuggucaacugccuucutt

SEQ ID NO: 393 - DNA, 21 bp, Artificial Sequence
  Description of Artificial Sequence: Synthetic oligonucleotide
  Description of Combined DNA/RNA Molecule: Synthetic oligonucleotide
guacauaagaccuuauuugtt

SEQ ID NO: 394 - DNA, 21 bp, Artificial Sequence
  Description of Artificial Sequence: Synthetic oligonucleotide
  Description of Combined DNA/RNA Molecule: Synthetic oligonucleotide
caaauaaggucuuauguactt

SEQ ID NO: 395 - DNA, 21 bp, Artificial Sequence
  Description of Artificial Sequence: Synthetic oligonucleotide
  Description of Combined DNA/RNA Molecule: Synthetic oligonucleotide
uauaauugcacuaucuuugtt

SEQ ID NO: 396 - DNA, 21 bp, Artificial Sequence
  Description of Artificial Sequence: Synthetic oligonucleotide
  Description of Combined DNA/RNA Molecule: Synthetic oligonucleotide
caaagauagugcaauuauatt

SEQ ID NO: 397 - DNA, 21 bp, Artificial Sequence
  Description of Artificial Sequence: Synthetic oligonucleotide
  Description of Combined DNA/RNA Molecule: Synthetic oligonucleotide
ucucuguuacaauacauautt

SEQ ID NO: 398 - DNA, 21 bp, Artificial Sequence
  Description of Artificial Sequence: Synthetic oligonucleotide
  Description of Combined DNA/RNA Molecule: Synthetic oligonucleotide
auauguauuguaacagagatt

SEQ ID NO: 399 - DNA, 21 bp, Artificial Sequence
  Description of Artificial Sequence: Synthetic oligonucleotide
  Description of Combined DNA/RNA Molecule: Synthetic oligonucleotide
uaugcucauagagcaaagatt

SEQ ID NO: 400 - DNA, 21 bp, Artificial Sequence
  Description of Artificial Sequence: Synthetic oligonucleotide
  Description of Combined DNA/RNA Molecule: Synthetic oligonucleotide
ucuuugcucuaugagcauatt

SEQ ID NO: 401 - DNA, 21 bp, Artificial Sequence
  Description of Artificial Sequence: Synthetic oligonucleotide
  Description of Combined DNA/RNA Molecule: Synthetic oligonucleotide
uguuguuuguccaauucugtt

SEQ ID NO: 402 - DNA, 21 bp, Artificial Sequence
  Description of Artificial Sequence: Synthetic oligonucleotide
  Description of Combined DNA/RNA Molecule: Synthetic oligonucleotide
cagaauuggacaaacaacatt

SEQ ID NO: 403 - DNA, 21 bp, Artificial Sequence
  Description of Artificial Sequence: Synthetic oligonucleotide
  Description of Combined DNA/RNA Molecule: Synthetic oligonucleotide
acuaacuagaauccuccagtt

SEQ ID NO: 404 - DNA, 21 bp, Artificial Sequence
  Description of Artificial Sequence: Synthetic oligonucleotide
  Description of Combined DNA/RNA Molecule: Synthetic oligonucleotide
cuggaggauucuaguuagutt

SEQ ID NO: 405 - DNA, 21 bp, Artificial Sequence
  Description of Artificial Sequence: Synthetic oligonucleotide
  Description of Combined DNA/RNA Molecule: Synthetic oligonucleotide
uguggugucuauacugaaatt

SEQ ID NO: 406 - DNA, 21 bp, Artificial Sequence
  Description of Artificial Sequence: Synthetic oligonucleotide
  Description of Combined DNA/RNA Molecule: Synthetic oligonucleotide
uuucaguauagacaccacatt

SEQ ID NO: 407 - DNA, 21 bp, Artificial Sequence
  Description of Artificial Sequence: Synthetic oligonucleotide
  Description of Combined DNA/RNA Molecule: Synthetic oligonucleotide
uauuaugggagaccacccatt

SEQ ID NO: 408 - DNA, 21 bp, Artificial Sequence
  Description of Artificial Sequence: Synthetic oligonucleotide
  Description of Combined DNA/RNA Molecule: Synthetic oligonucleotide
uggguggucucccauaauatt

SEQ ID NO: 409 - DNA, 21 bp, Artificial Sequence
  Description of Artificial Sequence: Synthetic oligonucleotide
  Description of Combined DNA/RNA Molecule: Synthetic oligonucleotide
aaggaugaagucuaucaaatt

SEQ ID NO: 410 - DNA, 21 bp, Artificial Sequence
  Description of Artificial Sequence: Synthetic oligonucleotide
  Description of Combined DNA/RNA Molecule: Synthetic oligonucleotide
uuugauagacuucauccuutt

SEQ ID NO: 411 - DNA, 21 bp, Artificial Sequence
  Description of Artificial Sequence: Synthetic oligonucleotide
  Description of Combined DNA/RNA Molecule: Synthetic oligonucleotide
uugauaagagagcucgggatt

SEQ ID NO: 412 - DNA, 21 bp, Artificial Sequence
  Description of Artificial Sequence: Synthetic oligonucleotide
  Description of Combined DNA/RNA Molecule: Synthetic oligonucleotide
ucccgagcucucuuaucaatt

SEQ ID NO: 413 - DNA, 21 bp, Artificial Sequence
  Description of Artificial Sequence: Synthetic oligonucleotide
  Description of Combined DNA/RNA Molecule: Synthetic oligonucleotide
auguuccuuaucgagaauctt

SEQ ID NO: 414 - DNA, 21 bp, Artificial Sequence
  Description of Artificial Sequence: Synthetic oligonucleotide
  Description of Combined DNA/RNA Molecule: Synthetic oligonucleotide
gauucucgauaaggaacautt

SEQ ID NO: 415 - DNA, 21 bp, Artificial Sequence
  Description of Artificial Sequence: Synthetic oligonucleotide
  Description of Combined DNA/RNA Molecule: Synthetic oligonucleotide
ggaauaugcucauagagcatt

SEQ ID NO: 416 - DNA, 21 bp, Artificial Sequence
  Description of Artificial Sequence: Synthetic oligonucleotide
  Description of Combined DNA/RNA Molecule: Synthetic oligonucleotide
ugcucuaugagcauauucctt

SEQ ID NO: 417 - DNA, 21 bp, Artificial Sequence
  Description of Artificial Sequence: Synthetic oligonucleotide
  Description of Combined DNA/RNA Molecule: Synthetic oligonucleotide
ccauuccaaacuggaucgutt

SEQ ID NO: 418 - DNA, 21 bp, Artificial Sequence
  Description of Artificial Sequence: Synthetic oligonucleotide
  Description of Combined DNA/RNA Molecule: Synthetic oligonucleotide
acgauccaguuuggaauggtt

SEQ ID NO: 419 - DNA, 21 bp, Artificial Sequence
  Description of Artificial Sequence: Synthetic oligonucleotide
  Description of Combined DNA/RNA Molecule: Synthetic oligonucleotide
ggcaguugaccaacacaautt

SEQ ID NO: 420 - DNA, 21 bp, Artificial Sequence
  Description of Artificial Sequence: Synthetic oligonucleotide
  Description of Combined DNA/RNA Molecule: Synthetic oligonucleotide
auuguguuggucaacugcctt

SEQ ID NO: 421 - DNA, 21 bp, Artificial Sequence
  Description of Artificial Sequence: Synthetic oligonucleotide
  Description of Combined DNA/RNA Molecule: Synthetic oligonucleotide
caugcuagaaguacauaagtt

SEQ ID NO: 422 - DNA, 21 bp, Artificial Sequence
  Description of Artificial Sequence: Synthetic oligonucleotide
  Description of Combined DNA/RNA Molecule: Synthetic oligonucleotide
cuuauguacuucuagcaugtt

SEQ ID NO: 423 - DNA, 21 bp, Artificial Sequence
  Description of Artificial Sequence: Synthetic oligonucleotide
  Description of Combined DNA/RNA Molecule: Synthetic oligonucleotide
cuagaaguacauaagaccutt

SEQ ID NO: 424 - DNA, 21 bp, Artificial Sequence
  Description of Artificial Sequence: Synthetic oligonucleotide
  Description of Combined DNA/RNA Molecule: Synthetic oligonucleotide
aggucuuauguacuucuagtt

SEQ ID NO: 425 - DNA, 21 bp, Artificial Sequence
  Description of Artificial Sequence: Synthetic oligonucleotide
  Description of Combined DNA/RNA Molecule: Synthetic oligonucleotide
uuggaucucucacaucuautt

SEQ ID NO: 426 - DNA, 21 bp, Artificial Sequence
  Description of Artificial Sequence: Synthetic oligonucleotide
  Description of Combined DNA/RNA Molecule: Synthetic oligonucleotide
auagaugugagagauccaatt

SEQ ID NO: 427 - DNA, 21 bp, Artificial Sequence
  Description of Artificial Sequence: Synthetic oligonucleotide
  Description of Combined DNA/RNA Molecule: Synthetic oligonucleotide
aacuguggugucuauacugtt

SEQ ID NO: 428 - DNA, 21 bp, Artificial Sequence
  Description of Artificial Sequence: Synthetic oligonucleotide
  Description of Combined DNA/RNA Molecule: Synthetic oligonucleotide
caguauagacaccacaguutt

SEQ ID NO: 429 - DNA, 21 bp, Artificial Sequence
  Description of Artificial Sequence: Synthetic oligonucleotide
  Description of Combined DNA/RNA Molecule: Synthetic oligonucleotide
ucauugacaguggccgauatt

SEQ ID NO: 430 - DNA, 21 bp, Artificial Sequence
  Description of Artificial Sequence: Synthetic oligonucleotide
  Description of Combined DNA/RNA Molecule: Synthetic oligonucleotide
uaucggccacugucaaugatt

SEQ ID NO: 431 - DNA, 21 bp, Artificial Sequence
  Description of Artificial Sequence: Synthetic oligonucleotide
  Description of Combined DNA/RNA Molecule: Synthetic oligonucleotide
auaaagcagacccauuccctt

SEQ ID NO: 432 - DNA, 21 bp, Artificial Sequence
  Description of Artificial Sequence: Synthetic oligonucleotide
  Description of Combined DNA/RNA Molecule: Synthetic oligonucleotide
gggaaugggucugcuuuautt

SEQ ID NO: 433 - DNA, 21 bp, Artificial Sequence
  Description of Artificial Sequence: Synthetic oligonucleotide
  Description of Combined DNA/RNA Molecule: Synthetic oligonucleotide
acagaaaccacuuaguagutt

SEQ ID NO: 434 - DNA, 21 bp, Artificial Sequence
  Description of Artificial Sequence: Synthetic oligonucleotide
  Description of Combined DNA/RNA Molecule: Synthetic oligonucleotide
acuacuaagugguuucugutt

SEQ ID NO: 435 - DNA, 21 bp, Artificial Sequence
  Description of Artificial Sequence: Synthetic oligonucleotide
  Description of Combined DNA/RNA Molecule: Synthetic oligonucleotide
gaaaccacuuaguaguguctt

SEQ ID NO: 436 - DNA, 21 bp, Artificial Sequence
  Description of Artificial Sequence: Synthetic oligonucleotide
  Description of Combined DNA/RNA Molecule: Synthetic oligonucleotide
gacacuacuaagugguuuctt

SEQ ID NO: 437 - DNA, 21 bp, Artificial Sequence
  Description of Artificial Sequence: Synthetic oligonucleotide
  Description of Combined DNA/RNA Molecule: Synthetic oligonucleotide
aaaucuaaggauauagucatt

SEQ ID NO: 438 - DNA, 21 bp, Artificial Sequence
  Description of Artificial Sequence: Synthetic oligonucleotide
  Description of Combined DNA/RNA Molecule: Synthetic oligonucleotide
ugacuauauccuuagauuutt

SEQ ID NO: 439 - DNA, 21 bp, Artificial Sequence
  Description of Artificial Sequence: Synthetic oligonucleotide
  Description of Combined DNA/RNA Molecule: Synthetic oligonucleotide
uuauuuauacccaucaacatt

SEQ ID NO: 440 - DNA, 21 bp, Artificial Sequence
  Description of Artificial Sequence: Synthetic oligonucleotide
  Description of Combined DNA/RNA Molecule: Synthetic oligonucleotide
uguugauggguauaaauaatt

SEQ ID NO: 441 - DNA, 21 bp, Artificial Sequence
  Description of Artificial Sequence: Synthetic oligonucleotide
  Description of Combined DNA/RNA Molecule: Synthetic oligonucleotide
acagaggcauuaacacacutt

SEQ ID NO: 442 - DNA, 21 bp, Artificial Sequence
  Description of Artificial Sequence: Synthetic oligonucleotide
  Description of Combined DNA/RNA Molecule: Synthetic oligonucleotide
aguguguuaaugccucugutt

SEQ ID NO: 443 - DNA, 21 bp, Artificial Sequence
  Description of Artificial Sequence: Synthetic oligonucleotide
  Description of Combined DNA/RNA Molecule: Synthetic oligonucleotide
acacacuggagaggucuaatt

SEQ ID NO: 444 - DNA, 21 bp, Artificial Sequence
  Description of Artificial Sequence: Synthetic oligonucleotide
  Description of Combined DNA/RNA Molecule: Synthetic oligonucleotide
uuagaccucuccagugugutt

SEQ ID NO: 445 - DNA, 21 bp, Artificial Sequence
  Description of Artificial Sequence: Synthetic oligonucleotide
  Description of Combined DNA/RNA Molecule: Synthetic oligonucleotide
acacuggagaggucuaaagtt

SEQ ID NO: 446 - DNA, 21 bp, Artificial Sequence
  Description of Artificial Sequence: Synthetic oligonucleotide
  Description of Combined DNA/RNA Molecule: Synthetic oligonucleotide
cuuuagaccucuccagugutt

SEQ ID NO: 447 - DNA, 21 bp, Artificial Sequence
  Description of Artificial Sequence: Synthetic oligonucleotide
  Description of Combined DNA/RNA Molecule: Synthetic oligonucleotide
cgagcccagaucaaccuuutt

SEQ ID NO: 448 - DNA, 21 bp, Artificial Sequence
  Description of Artificial Sequence: Synthetic oligonucleotide
  Description of Combined DNA/RNA Molecule: Synthetic oligonucleotide
aaagguugaucugggcucgtt

SEQ ID NO: 449 - DNA, 21 bp, Artificial Sequence
  Description of Artificial Sequence: Synthetic oligonucleotide
  Description of Combined DNA/RNA Molecule: Synthetic oligonucleotide
ucccuauuucgcuuucucctt

SEQ ID NO: 450 - DNA, 21 bp, Artificial Sequence
  Description of Artificial Sequence: Synthetic oligonucleotide
  Description of Combined DNA/RNA Molecule: Synthetic oligonucleotide
ggagaaagcgaaauagggatt

SEQ ID NO: 451 - DNA, 21 bp, Artificial Sequence
  Description of Artificial Sequence: Synthetic oligonucleotide
  Description of Combined DNA/RNA Molecule: Synthetic oligonucleotide
ucuaaaaucacugucaacatt

SEQ ID NO: 452 - DNA, 21 bp, Artificial Sequence
  Description of Artificial Sequence: Synthetic oligonucleotide
  Description of Combined DNA/RNA Molecule: Synthetic oligonucleotide
uguugacagugauuuuagatt

SEQ ID NO: 453 - DNA, 21 bp, Artificial Sequence
  Description of Artificial Sequence: Synthetic oligonucleotide
  Description of Combined DNA/RNA Molecule: Synthetic oligonucleotide
agccaaauucgucugcgaatt

SEQ ID NO: 454 - DNA, 21 bp, Artificial Sequence
  Description of Artificial Sequence: Synthetic oligonucleotide
  Description of Combined DNA/RNA Molecule: Synthetic oligonucleotide
uucgcagacgaauuuggcutt

SEQ ID NO: 455 - DNA, 21 bp, Artificial Sequence
  Description of Artificial Sequence: Synthetic oligonucleotide
  Description of Combined DNA/RNA Molecule: Synthetic oligonucleotide
cccauucaauaguagaaugtt

SEQ ID NO: 456 - DNA, 21 bp, Artificial Sequence
  Description of Artificial Sequence: Synthetic oligonucleotide
  Description of Combined DNA/RNA Molecule: Synthetic oligonucleotide
cauucuacuauugaaugggtt

SEQ ID NO: 457 - DNA, 21 bp, Artificial Sequence
  Description of Artificial Sequence: Synthetic oligonucleotide
  Description of Combined DNA/RNA Molecule: Synthetic oligonucleotide
gaugaaugcauacucuagutt

SEQ ID NO: 458 - DNA, 21 bp, Artificial Sequence
  Description of Artificial Sequence: Synthetic oligonucleotide
  Description of Combined DNA/RNA Molecule: Synthetic oligonucleotide
acuagaguaugcauucauctt

SEQ ID NO: 459 - DNA, 21 bp, Artificial Sequence
  Description of Artificial Sequence: Synthetic oligonucleotide
  Description of Combined DNA/RNA Molecule: Synthetic oligonucleotide
cucauguuccuuaucgagatt

SEQ ID NO: 460 - DNA, 21 bp, Artificial Sequence
  Description of Artificial Sequence: Synthetic oligonucleotide
  Description of Combined DNA/RNA Molecule: Synthetic oligonucleotide
ucucgauaaggaacaugagtt

SEQ ID NO: 461 - DNA, 21 bp, Artificial Sequence
  Description of Artificial Sequence: Synthetic oligonucleotide
  Description of Combined DNA/RNA Molecule: Synthetic oligonucleotide
gagaaucuaaacuaacuagtt

SEQ ID NO: 462 - DNA, 21 bp, Artificial Sequence
  Description of Artificial Sequence: Synthetic oligonucleotide
  Description of Combined DNA/RNA Molecule: Synthetic oligonucleotide
cuaguuaguuuagauucuctt

SEQ ID NO: 463 - DNA, 21 bp, Artificial Sequence
  Description of Artificial Sequence: Synthetic oligonucleotide
  Description of Combined DNA/RNA Molecule: Synthetic oligonucleotide
uagaaguacauaagaccuutt

SEQ ID NO: 464 - DNA, 21 bp, Artificial Sequence
  Description of Artificial Sequence: Synthetic oligonucleotide
  Description of Combined DNA/RNA Molecule: Synthetic oligonucleotide
aaggucuuauguacuucuatt

SEQ ID NO: 465 - DNA, 21 bp, Artificial Sequence
  Description of Artificial Sequence: Synthetic oligonucleotide
  Description of Combined DNA/RNA Molecule: Synthetic oligonucleotide
cagccugagcuguuaaugatt

SEQ ID NO: 466 - DNA, 21 bp, Artificial Sequence
  Description of Artificial Sequence: Synthetic oligonucleotide
  Description of Combined DNA/RNA Molecule: Synthetic oligonucleotide
ucauuaacagcucaggcugtt

SEQ ID NO: 467 - DNA, 21 bp, Artificial Sequence
  Description of Artificial Sequence: Synthetic oligonucleotide
  Description of Combined DNA/RNA Molecule: Synthetic oligonucleotide
aagaagagacaauuccggatt

SEQ ID NO: 468 - DNA, 21 bp, Artificial Sequence
  Description of Artificial Sequence: Synthetic oligonucleotide
  Description of Combined DNA/RNA Molecule: Synthetic oligonucleotide
uccggaauugucucuucuutt

SEQ ID NO: 469 - DNA, 21 bp, Artificial Sequence
  Description of Artificial Sequence: Synthetic oligonucleotide
  Description of Combined DNA/RNA Molecule: Synthetic oligonucleotide
ugcugguguggauuguucatt

SEQ ID NO: 470 - DNA, 21 bp, Artificial Sequence
  Description of Artificial Sequence: Synthetic oligonucleotide
  Description of Combined DNA/RNA Molecule: Synthetic oligonucleotide
ugaacaauccacaccagcatt

SEQ ID NO: 471 - DNA, 21 bp, Artificial Sequence
  Description of Artificial Sequence: Synthetic oligonucleotide
  Description of Combined DNA/RNA Molecule: Synthetic oligonucleotide
aaauucgucugcgaagaagtt

SEQ ID NO: 472 - DNA, 21 bp, Artificial Sequence
  Description of Artificial Sequence: Synthetic oligonucleotide
  Description of Combined DNA/RNA Molecule: Synthetic oligonucleotide
cuucuucgcagacgaauuutt

SEQ ID NO: 473 - DNA, 21 bp, Artificial Sequence
  Description of Artificial Sequence: Synthetic oligonucleotide
  Description of Combined DNA/RNA Molecule: Synthetic oligonucleotide
uuucuggaaguugagaugutt

SEQ ID NO: 474 - DNA, 21 bp, Artificial Sequence
  Description of Artificial Sequence: Synthetic oligonucleotide
  Description of Combined DNA/RNA Molecule: Synthetic oligonucleotide
acaucucaacuuccagaaatt

SEQ ID NO: 475 - DNA, 21 bp, Artificial Sequence
  Description of Artificial Sequence: Synthetic oligonucleotide
  Description of Combined DNA/RNA Molecule: Synthetic oligonucleotide
uacuaaacagauugauguutt

SEQ ID NO: 476 - DNA, 21 bp, Artificial Sequence
  Description of Artificial Sequence: Synthetic oligonucleotide
  Description of Combined DNA/RNA Molecule: Synthetic oligonucleotide
aacaucaaucuguuuaguatt

SEQ ID NO: 477 - DNA, 21 bp, Artificial Sequence
  Description of Artificial Sequence: Synthetic oligonucleotide
  Description of Combined DNA/RNA Molecule: Synthetic oligonucleotide
gauugauguuuaccgaagutt

SEQ ID NO: 478 - DNA, 21 bp, Artificial Sequence
  Description of Artificial Sequence: Synthetic oligonucleotide
  Description of Combined DNA/RNA Molecule: Synthetic oligonucleotide
acuucgguaaacaucaauctt

SEQ ID NO: 479 - DNA, 21 bp, Artificial Sequence
  Description of Artificial Sequence: Synthetic oligonucleotide
  Description of Combined DNA/RNA Molecule: Synthetic oligonucleotide
gcacuaucuuugcguauggtt

SEQ ID NO: 480 - DNA, 21 bp, Artificial Sequence
  Description of Artificial Sequence: Synthetic oligonucleotide
  Description of Combined DNA/RNA Molecule: Synthetic oligonucleotide
ccauacgcaaagauagugctt

SEQ ID NO: 481 - DNA, 21 bp, Artificial Sequence
  Description of Artificial Sequence: Synthetic oligonucleotide
  Description of Combined DNA/RNA Molecule: Synthetic oligonucleotide
ugguauaauuccacguacctt

SEQ ID NO: 482 - DNA, 21 bp, Artificial Sequence
  Description of Artificial Sequence: Synthetic oligonucleotide
  Description of Combined DNA/RNA Molecule: Synthetic oligonucleotide
gguacguggaauuauaccatt

SEQ ID NO: 483 - DNA, 21 bp, Artificial Sequence
  Description of Artificial Sequence: Synthetic oligonucleotide
  Description of Combined DNA/RNA Molecule: Synthetic oligonucleotide
agcaagcugcuuaacacagtt

SEQ ID NO: 484 - DNA, 21 bp, Artificial Sequence
  Description of Artificial Sequence: Synthetic oligonucleotide
  Description of Combined DNA/RNA Molecule: Synthetic oligonucleotide
cuguguuaagcagcuugcutt

SEQ ID NO: 485 - DNA, 21 bp, Artificial Sequence
  Description of Artificial Sequence: Synthetic oligonucleotide
  Description of Combined DNA/RNA Molecule: Synthetic oligonucleotide
cagaaaccacuuaguagugtt

SEQ ID NO: 486 - DNA, 21 bp, Artificial Sequence
  Description of Artificial Sequence: Synthetic oligonucleotide
  Description of Combined DNA/RNA Molecule: Synthetic oligonucleotide
cacuacuaagugguuucugtt

SEQ ID NO: 487 - DNA, 21 bp, Artificial Sequence
  Description of Artificial Sequence: Synthetic oligonucleotide
  Description of Combined DNA/RNA Molecule: Synthetic oligonucleotide
aacuuauuggagguuguaatt

SEQ ID NO: 488 - DNA, 21 bp, Artificial Sequence
  Description of Artificial Sequence: Synthetic oligonucleotide
  Description of Combined DNA/RNA Molecule: Synthetic oligonucleotide
uuacaaccuccaauaaguutt

SEQ ID NO: 489 - DNA, 21 bp, Artificial Sequence
  Description of Artificial Sequence: Synthetic oligonucleotide
  Description of Combined DNA/RNA Molecule: Synthetic oligonucleotide
cuggagaggucuaaaguggtt

SEQ ID NO: 490 - DNA, 21 bp, Artificial Sequence
  Description of Artificial Sequence: Synthetic oligonucleotide
  Description of Combined DNA/RNA Molecule: Synthetic oligonucleotide
ccacuuuagaccucuccagtt

SEQ ID NO: 491 - DNA, 21 bp, Artificial Sequence
  Description of Artificial Sequence: Synthetic oligonucleotide
  Description of Combined DNA/RNA Molecule: Synthetic oligonucleotide
aaaaaagauauaaggcagutt

SEQ ID NO: 492 - DNA, 21 bp, Artificial Sequence
  Description of Artificial Sequence: Synthetic oligonucleotide
  Description of Combined DNA/RNA Molecule: Synthetic oligonucleotide
acugccuuauaucuuuuuutt

SEQ ID NO: 493 - DNA, 21 bp, Artificial Sequence
  Description of Artificial Sequence: Synthetic oligonucleotide
  Description of Combined DNA/RNA Molecule: Synthetic oligonucleotide
gaauuuugauaucuacccatt

SEQ ID NO: 494 - DNA, 21 bp, Artificial Sequence
  Description of Artificial Sequence: Synthetic oligonucleotide
  Description of Combined DNA/RNA Molecule: Synthetic oligonucleotide
uggguagauaucaaaauuctt

SEQ ID NO: 495 - DNA, 21 bp, Artificial Sequence
  Description of Artificial Sequence: Synthetic oligonucleotide
  Description of Combined DNA/RNA Molecule: Synthetic oligonucleotide
guauuuuugaucuggcaactt

SEQ ID NO: 496 - DNA, 21 bp, Artificial Sequence
  Description of Artificial Sequence: Synthetic oligonucleotide
  Description of Combined DNA/RNA Molecule: Synthetic oligonucleotide
guugccagaucaaaaauactt

SEQ ID NO: 497 - DNA, 21 bp, Artificial Sequence
  Description of Artificial Sequence: Synthetic oligonucleotide
  Description of Combined DNA/RNA Molecule: Synthetic oligonucleotide
aggaucccuuggcugguautt

SEQ ID NO: 498 - DNA, 21 bp, Artificial Sequence
  Description of Artificial Sequence: Synthetic oligonucleotide
  Description of Combined DNA/RNA Molecule: Synthetic oligonucleotide
auaccagccaagggauccutt

SEQ ID NO: 499 - DNA, 21 bp, Artificial Sequence
  Description of Artificial Sequence: Synthetic oligonucleotide
  Description of Combined DNA/RNA Molecule: Synthetic oligonucleotide
ggaucccuuggcugguauatt

SEQ ID NO: 500 - DNA, 21 bp, Artificial Sequence
  Description of Artificial Sequence: Synthetic oligonucleotide
  Description of Combined DNA/RNA Molecule: Synthetic oligonucleotide
uauaccagccaagggaucctt

SEQ ID NO: 501 - DNA, 21 bp, Artificial Sequence
  Description of Artificial Sequence: Synthetic oligonucleotide
  Description of Combined DNA/RNA Molecule: Synthetic oligonucleotide
caauaguagaaugugaucctt

SEQ ID NO: 502 - DNA, 21 bp, Artificial Sequence
  Description of Artificial Sequence: Synthetic oligonucleotide
  Description of Combined DNA/RNA Molecule: Synthetic oligonucleotide
ggaucacauucuacuauugtt

SEQ ID NO: 503 - DNA, 21 bp, Artificial Sequence
  Description of Artificial Sequence: Synthetic oligonucleotide
  Description of Combined DNA/RNA Molecule: Synthetic oligonucleotide
gcuauaauugcacuaucuutt

SEQ ID NO: 504 - DNA, 21 bp, Artificial Sequence
  Description of Artificial Sequence: Synthetic oligonucleotide
  Description of Combined DNA/RNA Molecule: Synthetic oligonucleotide
aagauagugcaauuauagctt

SEQ ID NO: 505 - DNA, 21 bp, Artificial Sequence
  Description of Artificial Sequence: Synthetic oligonucleotide
  Description of Combined DNA/RNA Molecule: Synthetic oligonucleotide
uacccuucaucaaauuuuutt

SEQ ID NO: 506 - DNA, 21 bp, Artificial Sequence
  Description of Artificial Sequence: Synthetic oligonucleotide
  Description of Combined DNA/RNA Molecule: Synthetic oligonucleotide
aaaaauuugaugaaggguatt

SEQ ID NO: 507 - DNA, 21 bp, Artificial Sequence
  Description of Artificial Sequence: Synthetic oligonucleotide
  Description of Combined DNA/RNA Molecule: Synthetic oligonucleotide
agaacauauugaauaagcctt

SEQ ID NO: 508 - DNA, 21 bp, Artificial Sequence
  Description of Artificial Sequence: Synthetic oligonucleotide
  Description of Combined DNA/RNA Molecule: Synthetic oligonucleotide
ggcuuauucaauauguucutt

SEQ ID NO: 509 - DNA, 21 bp, Artificial Sequence
  Description of Artificial Sequence: Synthetic oligonucleotide
  Description of Combined DNA/RNA Molecule: Synthetic oligonucleotide
aaauuggugcuguugaggatt

SEQ ID NO: 510 - DNA, 21 bp, Artificial Sequence
  Description of Artificial Sequence: Synthetic oligonucleotide
  Description of Combined DNA/RNA Molecule: Synthetic oligonucleotide
uccucaacagcaccaauuutt

SEQ ID NO: 511 - DNA, 21 bp, Artificial Sequence
  Description of Artificial Sequence: Synthetic oligonucleotide
  Description of Combined DNA/RNA Molecule: Synthetic oligonucleotide
ugaauaggguuacagaguutt

SEQ ID NO: 512 - DNA, 21 bp, Artificial Sequence
  Description of Artificial Sequence: Synthetic oligonucleotide
  Description of Combined DNA/RNA Molecule: Synthetic oligonucleotide
aacucuguaacccuauucatt

SEQ ID NO: 513 - DNA, 21 bp, Artificial Sequence
  Description of Artificial Sequence: Synthetic oligonucleotide
  Description of Combined DNA/RNA Molecule: Synthetic oligonucleotide
aagaacuugaaaccacucatt

SEQ ID NO: 514 - DNA, 21 bp, Artificial Sequence
  Description of Artificial Sequence: Synthetic oligonucleotide
  Description of Combined DNA/RNA Molecule: Synthetic oligonucleotide
ugagugguuucaaguucuutt

SEQ ID NO: 515 - DNA, 21 bp, Artificial Sequence
  Description of Artificial Sequence: Synthetic oligonucleotide
  Description of Combined DNA/RNA Molecule: Synthetic oligonucleotide
aauaaagcagacccauucctt

SEQ ID NO: 516 - DNA, 21 bp, Artificial Sequence
  Description of Artificial Sequence: Synthetic oligonucleotide
  Description of Combined DNA/RNA Molecule: Synthetic oligonucleotide
ggaaugggucugcuuuauutt

SEQ ID NO: 517 - DNA, 21 bp, Artificial Sequence
  Description of Artificial Sequence: Synthetic oligonucleotide
  Description of Combined DNA/RNA Molecule: Synthetic oligonucleotide
auacccaucaacacugguatt

SEQ ID NO: 518 - DNA, 21 bp, Artificial Sequence
  Description of Artificial Sequence: Synthetic oligonucleotide
  Description of Combined DNA/RNA Molecule: Synthetic oligonucleotide
uaccaguguugauggguautt

SEQ ID NO: 519 - DNA, 21 bp, Artificial Sequence
  Description of Artificial Sequence: Synthetic oligonucleotide
  Description of Combined DNA/RNA Molecule: Synthetic oligonucleotide
uggauuguucaucaauuggtt

SEQ ID NO: 520 - DNA, 21 bp, Artificial Sequence
  Description of Artificial Sequence: Synthetic oligonucleotide
  Description of Combined DNA/RNA Molecule: Synthetic oligonucleotide
ccaauugaugaacaauccatt

SEQ ID NO: 521 - DNA, 21 bp, Artificial Sequence
  Description of Artificial Sequence: Synthetic oligonucleotide
  Description of Combined DNA/RNA Molecule: Synthetic oligonucleotide
uggagaggucuaaaguggatt

SEQ ID NO: 522 - DNA, 21 bp, Artificial Sequence
  Description of Artificial Sequence: Synthetic oligonucleotide
  Description of Combined DNA/RNA Molecule: Synthetic oligonucleotide
uccacuuuagaccucuccatt

SEQ ID NO: 523 - DNA, 21 bp, Artificial Sequence
  Description of Artificial Sequence: Synthetic oligonucleotide
  Description of Combined DNA/RNA Molecule: Synthetic oligonucleotide
gucaucccuauaguucacutt

SEQ ID NO: 524 - DNA, 21 bp, Artificial Sequence
  Description of Artificial Sequence: Synthetic oligonucleotide
  Description of Combined DNA/RNA Molecule: Synthetic oligonucleotide
agugaacuauagggaugactt

SEQ ID NO: 525 - DNA, 21 bp, Artificial Sequence
  Description of Artificial Sequence: Synthetic oligonucleotide
  Description of Combined DNA/RNA Molecule: Synthetic oligonucleotide
auaauggcuauaauuucuctt

SEQ ID NO: 526 - DNA, 21 bp, Artificial Sequence
  Description of Artificial Sequence: Synthetic oligonucleotide
  Description of Combined DNA/RNA Molecule: Synthetic oligonucleotide
gagaaauuauagccauuautt

SEQ ID NO: 527 - DNA, 21 bp, Artificial Sequence
  Description of Artificial Sequence: Synthetic oligonucleotide
  Description of Combined DNA/RNA Molecule: Synthetic oligonucleotide
aucccuuggcugguauaautt

SEQ ID NO: 528 - DNA, 21 bp, Artificial Sequence
  Description of Artificial Sequence: Synthetic oligonucleotide
  Description of Combined DNA/RNA Molecule: Synthetic oligonucleotide
auuauaccagccaagggautt

SEQ ID NO: 529 - DNA, 21 bp, Artificial Sequence
  Description of Artificial Sequence: Synthetic oligonucleotide
  Description of Combined DNA/RNA Molecule: Synthetic oligonucleotide
gggcuauaauugcacuauctt

SEQ ID NO: 530 - DNA, 21 bp, Artificial Sequence
  Description of Artificial Sequence: Synthetic oligonucleotide
  Description of Combined DNA/RNA Molecule: Synthetic oligonucleotide
gauagugcaauuauagccctt

SEQ ID NO: 531 - DNA, 21 bp, Artificial Sequence
  Description of Artificial Sequence: Synthetic oligonucleotide
  Description of Combined DNA/RNA Molecule: Synthetic oligonucleotide
gauucucuuggagggcguatt

SEQ ID NO: 532 - DNA, 21 bp, Artificial Sequence
  Description of Artificial Sequence: Synthetic oligonucleotide
  Description of Combined DNA/RNA Molecule: Synthetic oligonucleotide
uacgcccuccaagagaauctt

SEQ ID NO: 533 - DNA, 21 bp, Artificial Sequence
  Description of Artificial Sequence: Synthetic oligonucleotide
  Description of Combined DNA/RNA Molecule: Synthetic oligonucleotide
gcaucucucaaucuugaggtt

SEQ ID NO: 534 - DNA, 21 bp, Artificial Sequence
  Description of Artificial Sequence: Synthetic oligonucleotide
  Description of Combined DNA/RNA Molecule: Synthetic oligonucleotide
ccucaagauugagagaugctt

SEQ ID NO: 535 - DNA, 21 bp, Artificial Sequence
  Description of Artificial Sequence: Synthetic oligonucleotide
  Description of Combined DNA/RNA Molecule: Synthetic oligonucleotide
cagcagaaaucuaaggauatt

SEQ ID NO: 536 - DNA, 21 bp, Artificial Sequence
  Description of Artificial Sequence: Synthetic oligonucleotide
  Description of Combined DNA/RNA Molecule: Synthetic oligonucleotide
uauccuuagauuucugcugtt

SEQ ID NO: 537 - DNA, 21 bp, Artificial Sequence
  Description of Artificial Sequence: Synthetic oligonucleotide
  Description of Combined DNA/RNA Molecule: Synthetic oligonucleotide
gucaagagccaucuguagatt

SEQ ID NO: 538 - DNA, 21 bp, Artificial Sequence
  Description of Artificial Sequence: Synthetic oligonucleotide
  Description of Combined DNA/RNA Molecule: Synthetic oligonucleotide
ucuacagauggcucuugactt

SEQ ID NO: 539 - DNA, 21 bp, Artificial Sequence
  Description of Artificial Sequence: Synthetic oligonucleotide
  Description of Combined DNA/RNA Molecule: Synthetic oligonucleotide
aaacagaggcauuaacacatt

SEQ ID NO: 540 - DNA, 21 bp, Artificial Sequence
  Description of Artificial Sequence: Synthetic oligonucleotide
  Description of Combined DNA/RNA Molecule: Synthetic oligonucleotide
uguguuaaugccucuguuutt

SEQ ID NO: 541 - DNA, 21 bp, Artificial Sequence
  Description of Artificial Sequence: Synthetic oligonucleotide
  Description of Combined DNA/RNA Molecule: Synthetic oligonucleotide
agcccagaucaaccuuuaatt

SEQ ID NO: 542 - DNA, 21 bp, Artificial Sequence
  Description of Artificial Sequence: Synthetic oligonucleotide
  Description of Combined DNA/RNA Molecule: Synthetic oligonucleotide
uuaaagguugaucugggcutt

SEQ ID NO: 543 - DNA, 21 bp, Artificial Sequence
  Description of Artificial Sequence: Synthetic oligonucleotide
  Description of Combined DNA/RNA Molecule: Synthetic oligonucleotide
uauuuuugaucuggcaacctt

SEQ ID NO: 544 - DNA, 21 bp, Artificial Sequence
  Description of Artificial Sequence: Synthetic oligonucleotide
  Description of Combined DNA/RNA Molecule: Synthetic oligonucleotide
gguugccagaucaaaaauatt

SEQ ID NO: 545 - DNA, 21 bp, Artificial Sequence
  Description of Artificial Sequence: Synthetic oligonucleotide
  Description of Combined DNA/RNA Molecule: Synthetic oligonucleotide
uguuuggagcaucuacuaatt

SEQ ID NO: 546 - DNA, 21 bp, Artificial Sequence
  Description of Artificial Sequence: Synthetic oligonucleotide
  Description of Combined DNA/RNA Molecule: Synthetic oligonucleotide
uuaguagaugcuccaaacatt

SEQ ID NO: 547 - DNA, 21 bp, Artificial Sequence
  Description of Artificial Sequence: Synthetic oligonucleotide
  Description of Combined DNA/RNA Molecule: Synthetic oligonucleotide
gaaauuacaguacacaacatt

SEQ ID NO: 548 - DNA, 21 bp, Artificial Sequence
  Description of Artificial Sequence: Synthetic oligonucleotide
  Description of Combined DNA/RNA Molecule: Synthetic oligonucleotide
uguuguguacuguaauuuctt

SEQ ID NO: 549 - DNA, 21 bp, Artificial Sequence
  Description of Artificial Sequence: Synthetic oligonucleotide
  Description of Combined DNA/RNA Molecule: Synthetic oligonucleotide
acuugaccaguguaaaucutt

SEQ ID NO: 550 - DNA, 21 bp, Artificial Sequence
  Description of Artificial Sequence: Synthetic oligonucleotide
  Description of Combined DNA/RNA Molecule: Synthetic oligonucleotide
agauuuacacuggucaagutt

SEQ ID NO: 551 - DNA, 21 bp, Artificial Sequence
  Description of Artificial Sequence: Synthetic oligonucleotide
  Description of Combined DNA/RNA Molecule: Synthetic oligonucleotide
accaguguaaaucugaccutt

SEQ ID NO: 552 - DNA, 21 bp, Artificial Sequence
  Description of Artificial Sequence: Synthetic oligonucleotide
  Description of Combined DNA/RNA Molecule: Synthetic oligonucleotide
aggucagauuuacacuggutt

SEQ ID NO: 553 - DNA, 21 bp, Artificial Sequence
  Description of Artificial Sequence: Synthetic oligonucleotide
  Description of Combined DNA/RNA Molecule: Synthetic oligonucleotide
agaacaaucauuagcagcatt

SEQ ID NO: 554 - DNA, 21 bp, Artificial Sequence
  Description of Artificial Sequence: Synthetic oligonucleotide
  Description of Combined DNA/RNA Molecule: Synthetic oligonucleotide
ugcugcuaaugauuguucutt

SEQ ID NO: 555 - DNA, 21 bp, Artificial Sequence
  Description of Artificial Sequence: Synthetic oligonucleotide
  Description of Combined DNA/RNA Molecule: Synthetic oligonucleotide
caauguggaaaccuaacugtt

SEQ ID NO: 556 - DNA, 21 bp, Artificial Sequence
  Description of Artificial Sequence: Synthetic oligonucleotide
  Description of Combined DNA/RNA Molecule: Synthetic oligonucleotide
caguuagguuuccacauugtt

SEQ ID NO: 557 - DNA, 21 bp, Artificial Sequence
  Description of Artificial Sequence: Synthetic oligonucleotide
  Description of Combined DNA/RNA Molecule: Synthetic oligonucleotide
accaagaagguacaaaauutt

SEQ ID NO: 558 - DNA, 21 bp, Artificial Sequence
  Description of Artificial Sequence: Synthetic oligonucleotide
  Description of Combined DNA/RNA Molecule: Synthetic oligonucleotide
aauuuuguaccuucuuggutt

SEQ ID NO: 559 - DNA, 21 bp, Artificial Sequence
  Description of Artificial Sequence: Synthetic oligonucleotide
  Description of Combined DNA/RNA Molecule: Synthetic oligonucleotide
gguacaaaauugguugaagtt

SEQ ID NO: 560 - DNA, 21 bp, Artificial Sequence
  Description of Artificial Sequence: Synthetic oligonucleotide
  Description of Combined DNA/RNA Molecule: Synthetic oligonucleotide
cuucaaccaauuuuguacctt

SEQ ID NO: 561 - DNA, 21 bp, Artificial Sequence
  Description of Artificial Sequence: Synthetic oligonucleotide
  Description of Combined DNA/RNA Molecule: Synthetic oligonucleotide
gguguggauuguucaucaatt

SEQ ID NO: 562 - DNA, 21 bp, Artificial Sequence
  Description of Artificial Sequence: Synthetic oligonucleotide
  Description of Combined DNA/RNA Molecule: Synthetic oligonucleotide
uugaugaacaauccacacctt

SEQ ID NO: 563 - DNA, 21 bp, Artificial Sequence
  Description of Artificial Sequence: Synthetic oligonucleotide
  Description of Combined DNA/RNA Molecule: Synthetic oligonucleotide
agaguucacaaaaagcccatt

SEQ ID NO: 564 - DNA, 21 bp, Artificial Sequence
  Description of Artificial Sequence: Synthetic oligonucleotide
  Description of Combined DNA/RNA Molecule: Synthetic oligonucleotide
ugggcuuuuugugaacucutt

SEQ ID NO: 565 - DNA, 21 bp, Artificial Sequence
  Description of Artificial Sequence: Synthetic oligonucleotide
  Description of Combined DNA/RNA Molecule: Synthetic oligonucleotide
ugauagcuaaauuaaaccatt

SEQ ID NO: 566 - DNA, 21 bp, Artificial Sequence
  Description of Artificial Sequence: Synthetic oligonucleotide
  Description of Combined DNA/RNA Molecule: Synthetic oligonucleotide
ugguuuaauuuagcuaucatt

SEQ ID NO: 567 - DNA, 21 bp, Artificial Sequence
  Description of Artificial Sequence: Synthetic oligonucleotide
  Description of Combined DNA/RNA Molecule: Synthetic oligonucleotide
aauaagccugaagugaauctt

SEQ ID NO: 568 - DNA, 21 bp, Artificial Sequence
  Description of Artificial Sequence: Synthetic oligonucleotide
  Description of Combined DNA/RNA Molecule: Synthetic oligonucleotide
gauucacuucaggcuuauutt

SEQ ID NO: 569 - DNA, 21 bp, Artificial Sequence
  Description of Artificial Sequence: Synthetic oligonucleotide
  Description of Combined DNA/RNA Molecule: Synthetic oligonucleotide
caguugaccaacacaaugctt

SEQ ID NO: 570 - DNA, 21 bp, Artificial Sequence
  Description of Artificial Sequence: Synthetic oligonucleotide
  Description of Combined DNA/RNA Molecule: Synthetic oligonucleotide
gcauuguguuggucaacugtt

SEQ ID NO: 571 - DNA, 21 bp, Artificial Sequence
  Description of Artificial Sequence: Synthetic oligonucleotide
  Description of Combined DNA/RNA Molecule: Synthetic oligonucleotide
ugguguggauuguucaucatt

SEQ ID NO: 572 - DNA, 21 bp, Artificial Sequence
  Description of Artificial Sequence: Synthetic oligonucleotide
  Description of Combined DNA/RNA Molecule: Synthetic oligonucleotide
ugaugaacaauccacaccatt

SEQ ID NO: 573 - DNA, 21 bp, Artificial Sequence
  Description of Artificial Sequence: Synthetic oligonucleotide
  Description of Combined DNA/RNA Molecule: Synthetic oligonucleotide
auucacccugacagaguuctt

SEQ ID NO: 574 - DNA, 21 bp, Artificial Sequence
  Description of Artificial Sequence: Synthetic oligonucleotide
  Description of Combined DNA/RNA Molecule: Synthetic oligonucleotide
gaacucugucagggugaautt

SEQ ID NO: 575 - DNA, 21 bp, Artificial Sequence
  Description of Artificial Sequence: Synthetic oligonucleotide
  Description of Combined DNA/RNA Molecule: Synthetic oligonucleotide
uaagaccuuauuugguaautt

SEQ ID NO: 576 - DNA, 21 bp, Artificial Sequence
  Description of Artificial Sequence: Synthetic oligonucleotide
  Description of Combined DNA/RNA Molecule: Synthetic oligonucleotide
auuaccaaauaaggucuuatt

SEQ ID NO: 577 - DNA, 21 bp, Artificial Sequence
  Description of Artificial Sequence: Synthetic oligonucleotide
  Description of Combined DNA/RNA Molecule: Synthetic oligonucleotide
aagcaauguggaaaccuaatt

SEQ ID NO: 578 - DNA, 21 bp, Artificial Sequence
  Description of Artificial Sequence: Synthetic oligonucleotide
  Description of Combined DNA/RNA Molecule: Synthetic oligonucleotide
uuagguuuccacauugcuutt

SEQ ID NO: 579 - DNA, 21 bp, Artificial Sequence
  Description of Artificial Sequence: Synthetic oligonucleotide
  Description of Combined DNA/RNA Molecule: Synthetic oligonucleotide
ucugaaacuggauaucccatt

SEQ ID NO: 580 - DNA, 21 bp, Artificial Sequence
  Description of Artificial Sequence: Synthetic oligonucleotide
  Description of Combined DNA/RNA Molecule: Synthetic oligonucleotide
ugggauauccaguuucagatt

SEQ ID NO: 581 - skipped

SEQ ID NO: 582 - DNA, 21 bp, Artificial Sequence
  Description of Artificial Sequence: Synthetic oligonucleotide
  Description of Combined DNA/RNA Molecule: Synthetic oligonucleotide
ccauuacuacaguagcacutt

SEQ ID NO: 583 - DNA, 21 bp, Artificial Sequence
  Description of Artificial Sequence: Synthetic oligonucleotide
  Description of Combined DNA/RNA Molecule: Synthetic oligonucleotide
agugcuacuguaguaauggtt

SEQ ID NO: 584 - DNA, 21 bp, Artificial Sequence
  Description of Artificial Sequence: Synthetic oligonucleotide
  Description of Combined DNA/RNA Molecule: Synthetic oligonucleotide
aucuggcaaccauauuucutt

SEQ ID NO: 585 - DNA, 21 bp, Artificial Sequence
  Description of Artificial Sequence: Synthetic oligonucleotide
  Description of Combined DNA/RNA Molecule: Synthetic oligonucleotide
agaaauaugguugccagautt

SEQ ID NO: 586 - DNA, 21 bp, Artificial Sequence
  Description of Artificial Sequence: Synthetic oligonucleotide
  Description of Combined DNA/RNA Molecule: Synthetic oligonucleotide
gauagcuaaauuaaaccaatt

SEQ ID NO: 587 - DNA, 21 bp, Artificial Sequence
  Description of Artificial Sequence: Synthetic oligonucleotide
  Description of Combined DNA/RNA Molecule: Synthetic oligonucleotide
uugguuuaauuuagcuauctt

SEQ ID NO: 588 - DNA, 21 bp, Artificial Sequence
  Description of Artificial Sequence: Synthetic oligonucleotide
  Description of Combined DNA/RNA Molecule: Synthetic oligonucleotide
agauaccauuacuacaguatt

SEQ ID NO: 589 - DNA, 21 bp, Artificial Sequence
  Description of Artificial Sequence: Synthetic oligonucleotide
  Description of Combined DNA/RNA Molecule: Synthetic oligonucleotide
uacuguaguaaugguaucutt

SEQ ID NO: 590 - DNA, 21 bp, Artificial Sequence
  Description of Artificial Sequence: Synthetic oligonucleotide
  Description of Combined DNA/RNA Molecule: Synthetic oligonucleotide
gauuguucaucaauuggcgtt

SEQ ID NO: 591 - DNA, 21 bp, Artificial Sequence
  Description of Artificial Sequence: Synthetic oligonucleotide
  Description of Combined DNA/RNA Molecule: Synthetic oligonucleotide
cgccaauugaugaacaauctt

SEQ ID NO: 592 - DNA, 21 bp, Artificial Sequence
  Description of Artificial Sequence: Synthetic oligonucleotide
  Description of Combined DNA/RNA Molecule: Synthetic oligonucleotide
gcuuucuccucggcucacutt

SEQ ID NO: 593 - DNA, 21 bp, Artificial Sequence
  Description of Artificial Sequence: Synthetic oligonucleotide
  Description of Combined DNA/RNA Molecule: Synthetic oligonucleotide
agugagccgaggagaaagctt

SEQ ID NO: 594 - DNA, 21 bp, Artificial Sequence
  Description of Artificial Sequence: Synthetic oligonucleotide
  Description of Combined DNA/RNA Molecule: Synthetic oligonucleotide
ggaggauuggcugacaagatt

SEQ ID NO: 595 - DNA, 21 bp, Artificial Sequence
  Description of Artificial Sequence: Synthetic oligonucleotide
  Description of Combined DNA/RNA Molecule: Synthetic oligonucleotide
ucuugucagccaauccucctt

SEQ ID NO: 596 - DNA, 21 bp, Artificial Sequence
  Description of Artificial Sequence: Synthetic oligonucleotide
  Description of Combined DNA/RNA Molecule: Synthetic oligonucleotide
uaaugaagaguauaccuggtt

SEQ ID NO: 597 - DNA, 21 bp, Artificial Sequence
  Description of Artificial Sequence: Synthetic oligonucleotide
  Description of Combined DNA/RNA Molecule: Synthetic oligonucleotide
ccagguauacucuucauuatt

SEQ ID NO: 598 - DNA, 21 bp, Artificial Sequence
  Description of Artificial Sequence: Synthetic oligonucleotide
  Description of Combined DNA/RNA Molecule: Synthetic oligonucleotide
uuucaccaaaccauuuguatt

SEQ ID NO: 599 - DNA, 21 bp, Artificial Sequence
  Description of Artificial Sequence: Synthetic oligonucleotide
  Description of Combined DNA/RNA Molecule: Synthetic oligonucleotide
uacaaaugguuuggugaaatt

SEQ ID NO: 600 - DNA, 21 bp, Artificial Sequence
  Description of Artificial Sequence: Synthetic oligonucleotide
  Description of Combined DNA/RNA Molecule: Synthetic oligonucleotide
cuuauuaaggaguauacggtt

SEQ ID NO: 601 - DNA, 21 bp, Artificial Sequence
  Description of Artificial Sequence: Synthetic oligonucleotide
  Description of Combined DNA/RNA Molecule: Synthetic oligonucleotide
ccguauacuccuuaauaagtt

SEQ ID NO: 602 - DNA, 21 bp, Artificial Sequence
  Description of Artificial Sequence: Synthetic oligonucleotide
  Description of Combined DNA/RNA Molecule: Synthetic oligonucleotide
gaaaucagauggacguaagtt

SEQ ID NO: 603 - DNA, 21 bp, Artificial Sequence
  Description of Artificial Sequence: Synthetic oligonucleotide
  Description of Combined DNA/RNA Molecule: Synthetic oligonucleotide
cuuacguccaucugauuuctt

SEQ ID NO: 604 - DNA, 21 bp, Artificial Sequence
  Description of Artificial Sequence: Synthetic oligonucleotide
  Description of Combined DNA/RNA Molecule: Synthetic oligonucleotide
cagaugucagcauaagcgatt

SEQ ID NO: 605 - DNA, 21 bp, Artificial Sequence
  Description of Artificial Sequence: Synthetic oligonucleotide
  Description of Combined DNA/RNA Molecule: Synthetic oligonucleotide
ucgcuuaugcugacaucugtt

SEQ ID NO: 606 - DNA, 21 bp, Artificial Sequence
  Description of Artificial Sequence: Synthetic oligonucleotide
  Description of Combined DNA/RNA Molecule: Synthetic oligonucleotide
aucuaacccuaguuguauctt

SEQ ID NO: 607 - DNA, 21 bp, Artificial Sequence
  Description of Artificial Sequence: Synthetic oligonucleotide
  Description of Combined DNA/RNA Molecule: Synthetic oligonucleotide
gauacaacuaggguuagautt

SEQ ID NO: 608 - DNA, 21 bp, Artificial Sequence
  Description of Artificial Sequence: Synthetic oligonucleotide
  Description of Combined DNA/RNA Molecule: Synthetic oligonucleotide
aagagcuuguuaaaaucggtt

SEQ ID NO: 609 - DNA, 21 bp, Artificial Sequence
  Description of Artificial Sequence: Synthetic oligonucleotide
  Description of Combined DNA/RNA Molecule: Synthetic oligonucleotide
ccgauuuuaacaagcucuutt

SEQ ID NO: 610 - DNA, 21 bp, Artificial Sequence
  Description of Artificial Sequence: Synthetic oligonucleotide
  Description of Combined DNA/RNA Molecule: Synthetic oligonucleotide
uuaaggaguauacggaggatt

SEQ ID NO: 611 - DNA, 21 bp, Artificial Sequence
  Description of Artificial Sequence: Synthetic oligonucleotide
  Description of Combined DNA/RNA Molecule: Synthetic oligonucleotide
uccuccguauacuccuuaatt

SEQ ID NO: 612 - DNA, 21 bp, Artificial Sequence
  Description of Artificial Sequence: Synthetic oligonucleotide
  Description of Combined DNA/RNA Molecule: Synthetic oligonucleotide
uugcaauguaaauacguautt

SEQ ID NO: 613 - DNA, 21 bp, Artificial Sequence
  Description of Artificial Sequence: Synthetic oligonucleotide
  Description of Combined DNA/RNA Molecule: Synthetic oligonucleotide
auacguauuuacauugcaatt

SEQ ID NO: 614 - DNA, 21 bp, Artificial Sequence
  Description of Artificial Sequence: Synthetic oligonucleotide
  Description of Combined DNA/RNA Molecule: Synthetic oligonucleotide
ucuaacccuaguuguaucctt

SEQ ID NO: 615 - DNA, 21 bp, Artificial Sequence
  Description of Artificial Sequence: Synthetic oligonucleotide
  Description of Combined DNA/RNA Molecule: Synthetic oligonucleotide
ggauacaacuaggguuagatt

SEQ ID NO: 616 - DNA, 21 bp, Artificial Sequence
  Description of Artificial Sequence: Synthetic oligonucleotide
  Description of Combined DNA/RNA Molecule: Synthetic oligonucleotide
cauguaucuuuuucucgautt

SEQ ID NO: 617 - DNA, 21 bp, Artificial Sequence
  Description of Artificial Sequence: Synthetic oligonucleotide
  Description of Combined DNA/RNA Molecule: Synthetic oligonucleotide
aucgagaaaaagauacaugtt

SEQ ID NO: 618 - DNA, 21 bp, Artificial Sequence
  Description of Artificial Sequence: Synthetic oligonucleotide
  Description of Combined DNA/RNA Molecule: Synthetic oligonucleotide
gaugucagcauaagcgaugtt

SEQ ID NO: 619 - DNA, 21 bp, Artificial Sequence
  Description of Artificial Sequence: Synthetic oligonucleotide
  Description of Combined DNA/RNA Molecule: Synthetic oligonucleotide
caucgcuuaugcugacauctt

SEQ ID NO: 620 - DNA, 21 bp, Artificial Sequence
  Description of Artificial Sequence: Synthetic oligonucleotide
  Description of Combined DNA/RNA Molecule: Synthetic oligonucleotide
ucccaacagguacgacacctt

SEQ ID NO: 621 - DNA, 21 bp, Artificial Sequence
  Description of Artificial Sequence: Synthetic oligonucleotide
  Description of Combined DNA/RNA Molecule: Synthetic oligonucleotide
ggugucguaccuguugggatt

SEQ ID NO: 622 - DNA, 21 bp, Artificial Sequence
  Description of Artificial Sequence: Synthetic oligonucleotide
  Description of Combined DNA/RNA Molecule: Synthetic oligonucleotide
ugcucacgaugaguuuagutt

SEQ ID NO: 623 - DNA, 21 bp, Artificial Sequence
  Description of Artificial Sequence: Synthetic oligonucleotide
  Description of Combined DNA/RNA Molecule: Synthetic oligonucleotide
acuaaacucaucgugagcatt

SEQ ID NO: 624 - DNA, 21 bp, Artificial Sequence
  Description of Artificial Sequence: Synthetic oligonucleotide
  Description of Combined DNA/RNA Molecule: Synthetic oligonucleotide
agagcuuguuaaaaucggatt

SEQ ID NO: 625 - DNA, 21 bp, Artificial Sequence
  Description of Artificial Sequence: Synthetic oligonucleotide
  Description of Combined DNA/RNA Molecule: Synthetic oligonucleotide
uccgauuuuaacaagcucutt

SEQ ID NO: 626 - DNA, 21 bp, Artificial Sequence
  Description of Artificial Sequence: Synthetic oligonucleotide
  Description of Combined DNA/RNA Molecule: Synthetic oligonucleotide
gcguacaagaacaucuauatt

SEQ ID NO: 627 - DNA, 21 bp, Artificial Sequence
  Description of Artificial Sequence: Synthetic oligonucleotide
  Description of Combined DNA/RNA Molecule: Synthetic oligonucleotide
uauagauguucuuguacgctt

SEQ ID NO: 628 - DNA, 21 bp, Artificial Sequence
  Description of Artificial Sequence: Synthetic oligonucleotide
  Description of Combined DNA/RNA Molecule: Synthetic oligonucleotide
gagguuguaagccaauguutt

SEQ ID NO: 629 - DNA, 21 bp, Artificial Sequence
  Description of Artificial Sequence: Synthetic oligonucleotide
  Description of Combined DNA/RNA Molecule: Synthetic oligonucleotide
aacauuggcuuacaaccuctt

SEQ ID NO: 630 - DNA, 21 bp, Artificial Sequence
  Description of Artificial Sequence: Synthetic oligonucleotide
  Description of Combined DNA/RNA Molecule: Synthetic oligonucleotide
aacagguacgacaccacagtt

SEQ ID NO: 631 - DNA, 21 bp, Artificial Sequence
  Description of Artificial Sequence: Synthetic oligonucleotide
  Description of Combined DNA/RNA Molecule: Synthetic oligonucleotide
cuguggugucguaccuguutt

SEQ ID NO: 632 - DNA, 21 bp, Artificial Sequence
  Description of Artificial Sequence: Synthetic oligonucleotide
  Description of Combined DNA/RNA Molecule: Synthetic oligonucleotide
aacccuaguuguaucccuctt

SEQ ID NO: 633 - DNA, 21 bp, Artificial Sequence
  Description of Artificial Sequence: Synthetic oligonucleotide
  Description of Combined DNA/RNA Molecule: Synthetic oligonucleotide
gagggauacaacuaggguutt

SEQ ID NO: 634 - DNA, 21 bp, Artificial Sequence
  Description of Artificial Sequence: Synthetic oligonucleotide
  Description of Combined DNA/RNA Molecule: Synthetic oligonucleotide
gcauaagcgauggauaauatt

SEQ ID NO: 635 - DNA, 21 bp, Artificial Sequence
  Description of Artificial Sequence: Synthetic oligonucleotide
  Description of Combined DNA/RNA Molecule: Synthetic oligonucleotide
uauuauccaucgcuuaugctt

SEQ ID NO: 636 - DNA, 21 bp, Artificial Sequence
  Description of Artificial Sequence: Synthetic oligonucleotide
  Description of Combined DNA/RNA Molecule: Synthetic oligonucleotide
aagcgauggauaauaccuatt

SEQ ID NO: 637 - DNA, 21 bp, Artificial Sequence
  Description of Artificial Sequence: Synthetic oligonucleotide
  Description of Combined DNA/RNA Molecule: Synthetic oligonucleotide
uagguauuauccaucgcuutt

SEQ ID NO: 638 - DNA, 21 bp, Artificial Sequence
  Description of Artificial Sequence: Synthetic oligonucleotide
  Description of Combined DNA/RNA Molecule: Synthetic oligonucleotide
ugauccuguacgaaaagaatt

SEQ ID NO: 639 - DNA, 21 bp, Artificial Sequence
  Description of Artificial Sequence: Synthetic oligonucleotide
  Description of Combined DNA/RNA Molecule: Synthetic oligonucleotide
uucuuuucguacaggaucatt

SEQ ID NO: 640 - DNA, 21 bp, Artificial Sequence
  Description of Artificial Sequence: Synthetic oligonucleotide
  Description of Combined DNA/RNA Molecule: Synthetic oligonucleotide
aaaacauuggccguucuggtt

SEQ ID NO: 641 - DNA, 21 bp, Artificial Sequence
  Description of Artificial Sequence: Synthetic oligonucleotide
  Description of Combined DNA/RNA Molecule: Synthetic oligonucleotide
ccagaacggccaauguuuutt

SEQ ID NO: 642 - DNA, 21 bp, Artificial Sequence
  Description of Artificial Sequence: Synthetic oligonucleotide
  Description of Combined DNA/RNA Molecule: Synthetic oligonucleotide
cuuggagggcguacaagaatt

SEQ ID NO: 643 - DNA, 21 bp, Artificial Sequence
  Description of Artificial Sequence: Synthetic oligonucleotide
  Description of Combined DNA/RNA Molecule: Synthetic oligonucleotide
uucuuguacgcccuccaagtt

SEQ ID NO: 644 - DNA, 21 bp, Artificial Sequence
  Description of Artificial Sequence: Synthetic oligonucleotide
  Description of Combined DNA/RNA Molecule: Synthetic oligonucleotide
ggcguacaagaacaucuautt

SEQ ID NO: 645 - DNA, 21 bp, Artificial Sequence
  Description of Artificial Sequence: Synthetic oligonucleotide
  Description of Combined DNA/RNA Molecule: Synthetic oligonucleotide
auagauguucuuguacgcctt

SEQ ID NO: 646 - DNA, 21 bp, Artificial Sequence
  Description of Artificial Sequence: Synthetic oligonucleotide
  Description of Combined DNA/RNA Molecule: Synthetic oligonucleotide
acucugaguacauuggaautt

SEQ ID NO: 647 - DNA, 21 bp, Artificial Sequence
  Description of Artificial Sequence: Synthetic oligonucleotide
  Description of Combined DNA/RNA Molecule: Synthetic oligonucleotide
auuccaauguacucagagutt

SEQ ID NO: 648 - DNA, 21 bp, Artificial Sequence
  Description of Artificial Sequence: Synthetic oligonucleotide
  Description of Combined DNA/RNA Molecule: Synthetic oligonucleotide
uuauuaaggaguauacggatt

SEQ ID NO: 649 - DNA, 21 bp, Artificial Sequence
  Description of Artificial Sequence: Synthetic oligonucleotide
  Description of Combined DNA/RNA Molecule: Synthetic oligonucleotide
uccguauacuccuuaauaatt

SEQ ID NO: 650 - DNA, 21 bp, Artificial Sequence
  Description of Artificial Sequence: Synthetic oligonucleotide
  Description of Combined DNA/RNA Molecule: Synthetic oligonucleotide
uaaggaguauacggaggagtt

SEQ ID NO: 651 - DNA, 21 bp, Artificial Sequence
  Description of Artificial Sequence: Synthetic oligonucleotide
  Description of Combined DNA/RNA Molecule: Synthetic oligonucleotide
cuccuccguauacuccuuatt

SEQ ID NO: 652 - DNA, 21 bp, Artificial Sequence
  Description of Artificial Sequence: Synthetic oligonucleotide
  Description of Combined DNA/RNA Molecule: Synthetic oligonucleotide
aaaucaauagucaacuaaatt

SEQ ID NO: 653 - DNA, 21 bp, Artificial Sequence
  Description of Artificial Sequence: Synthetic oligonucleotide
  Description of Combined DNA/RNA Molecule: Synthetic oligonucleotide
uuuaguugacuauugauuutt

SEQ ID NO: 654 - DNA, 21 bp, Artificial Sequence
  Description of Artificial Sequence: Synthetic oligonucleotide
  Description of Combined DNA/RNA Molecule: Synthetic oligonucleotide
aaucaauagucaacuaaagtt

SEQ ID NO: 655 - DNA, 21 bp, Artificial Sequence
  Description of Artificial Sequence: Synthetic oligonucleotide
  Description of Combined DNA/RNA Molecule: Synthetic oligonucleotide
cuuuaguugacuauugauutt

SEQ ID NO: 656 - DNA, 21 bp, Artificial Sequence
  Description of Artificial Sequence: Synthetic oligonucleotide
  Description of Combined DNA/RNA Molecule: Synthetic oligonucleotide
uucucaguauacuguguaatt

SEQ ID NO: 657 - DNA, 21 bp, Artificial Sequence
  Description of Artificial Sequence: Synthetic oligonucleotide
  Description of Combined DNA/RNA Molecule: Synthetic oligonucleotide
uuacacaguauacugagaatt

SEQ ID NO: 658 - DNA, 21 bp, Artificial Sequence
  Description of Artificial Sequence: Synthetic oligonucleotide
  Description of Combined DNA/RNA Molecule: Synthetic oligonucleotide
ugugaaacacucugauaaatt

SEQ ID NO: 659 - DNA, 21 bp, Artificial Sequence
  Description of Artificial Sequence: Synthetic oligonucleotide
  Description of Combined DNA/RNA Molecule: Synthetic oligonucleotide
uuuaucagaguguuucacatt

SEQ ID NO: 660 - DNA, 21 bp, Artificial Sequence
  Description of Artificial Sequence: Synthetic oligonucleotide
  Description of Combined DNA/RNA Molecule: Synthetic oligonucleotide
agaugugaaucucugaacatt

SEQ ID NO: 661 - DNA, 21 bp, Artificial Sequence
  Description of Artificial Sequence: Synthetic oligonucleotide
  Description of Combined DNA/RNA Molecule: Synthetic oligonucleotide
uguucagagauucacaucutt

SEQ ID NO: 662 - DNA, 21 bp, Artificial Sequence
  Description of Artificial Sequence: Synthetic oligonucleotide
  Description of Combined DNA/RNA Molecule: Synthetic oligonucleotide
agguuguaagccaauguugtt

SEQ ID NO: 663 - DNA, 21 bp, Artificial Sequence
  Description of Artificial Sequence: Synthetic oligonucleotide
  Description of Combined DNA/RNA Molecule: Synthetic oligonucleotide
caacauuggcuuacaaccutt

SEQ ID NO: 664 - DNA, 21 bp, Artificial Sequence
  Description of Artificial Sequence: Synthetic oligonucleotide
  Description of Combined DNA/RNA Molecule: Synthetic oligonucleotide
ugagaaaucagauggacgutt

SEQ ID NO: 665 - DNA, 21 bp, Artificial Sequence
  Description of Artificial Sequence: Synthetic oligonucleotide
  Description of Combined DNA/RNA Molecule: Synthetic oligonucleotide
acguccaucugauuucucatt

SEQ ID NO: 666 - DNA, 21 bp, Artificial Sequence
  Description of Artificial Sequence: Synthetic oligonucleotide
  Description of Combined DNA/RNA Molecule: Synthetic oligonucleotide
agaaaucagauggacguaatt

SEQ ID NO: 667 - DNA, 21 bp, Artificial Sequence
  Description of Artificial Sequence: Synthetic oligonucleotide
  Description of Combined DNA/RNA Molecule: Synthetic oligonucleotide
uuacguccaucugauuucutt

SEQ ID NO: 668 - DNA, 21 bp, Artificial Sequence
  Description of Artificial Sequence: Synthetic oligonucleotide
  Description of Combined DNA/RNA Molecule: Synthetic oligonucleotide
auaucccaacagguacgactt

SEQ ID NO: 669 - DNA, 21 bp, Artificial Sequence
  Description of Artificial Sequence: Synthetic oligonucleotide
  Description of Combined DNA/RNA Molecule: Synthetic oligonucleotide
gucguaccuguugggauautt

SEQ ID NO: 670 - DNA, 21 bp, Artificial Sequence
  Description of Artificial Sequence: Synthetic oligonucleotide
  Description of Combined DNA/RNA Molecule: Synthetic oligonucleotide
cccaacagguacgacaccatt

SEQ ID NO: 671 - DNA, 21 bp, Artificial Sequence
  Description of Artificial Sequence: Synthetic oligonucleotide
  Description of Combined DNA/RNA Molecule: Synthetic oligonucleotide
uggugucguaccuguugggtt

SEQ ID NO: 672 - DNA, 21 bp, Artificial Sequence
  Description of Artificial Sequence: Synthetic oligonucleotide
  Description of Combined DNA/RNA Molecule: Synthetic oligonucleotide
aguauacugaagaaccucutt

SEQ ID NO: 673 - DNA, 21 bp, Artificial Sequence
  Description of Artificial Sequence: Synthetic oligonucleotide
  Description of Combined DNA/RNA Molecule: Synthetic oligonucleotide
agagguucuucaguauacutt

SEQ ID NO: 674 - DNA, 21 bp, Artificial Sequence
  Description of Artificial Sequence: Synthetic oligonucleotide
  Description of Combined DNA/RNA Molecule: Synthetic oligonucleotide
auauauaucagccgggcgctt

SEQ ID NO: 675 - DNA, 21 bp, Artificial Sequence
  Description of Artificial Sequence: Synthetic oligonucleotide
  Description of Combined DNA/RNA Molecule: Synthetic oligonucleotide
gcgcccggcugauauauautt

SEQ ID NO: 676 - DNA, 21 bp, Artificial Sequence
  Description of Artificial Sequence: Synthetic oligonucleotide
  Description of Combined DNA/RNA Molecule: Synthetic oligonucleotide
aaucuaacccuaguuguautt

SEQ ID NO: 677 - DNA, 21 bp, Artificial Sequence
  Description of Artificial Sequence: Synthetic oligonucleotide
  Description of Combined DNA/RNA Molecule: Synthetic oligonucleotide
auacaacuaggguuagauutt

SEQ ID NO: 678 - DNA, 21 bp, Artificial Sequence
  Description of Artificial Sequence: Synthetic oligonucleotide
  Description of Combined DNA/RNA Molecule: Synthetic oligonucleotide
cuaacccuaguuguauccctt

SEQ ID NO: 679 - DNA, 21 bp, Artificial Sequence
  Description of Artificial Sequence: Synthetic oligonucleotide
  Description of Combined DNA/RNA Molecule: Synthetic oligonucleotide
gggauacaacuaggguuagtt

SEQ ID NO: 680 - DNA, 21 bp, Artificial Sequence
  Description of Artificial Sequence: Synthetic oligonucleotide
  Description of Combined DNA/RNA Molecule: Synthetic oligonucleotide
cuaguuguaucccuccuuutt

SEQ ID NO: 681 - DNA, 21 bp, Artificial Sequence
  Description of Artificial Sequence: Synthetic oligonucleotide
  Description of Combined DNA/RNA Molecule: Synthetic oligonucleotide
aaaggagggauacaacuagtt

SEQ ID NO: 682 - DNA, 21 bp, Artificial Sequence
  Description of Artificial Sequence: Synthetic oligonucleotide
  Description of Combined DNA/RNA Molecule: Synthetic oligonucleotide
agacaucugacuaauggcutt

SEQ ID NO: 683 - DNA, 21 bp, Artificial Sequence
  Description of Artificial Sequence: Synthetic oligonucleotide
  Description of Combined DNA/RNA Molecule: Synthetic oligonucleotide
agccauuagucagaugucutt

SEQ ID NO: 684 - DNA, 21 bp, Artificial Sequence
  Description of Artificial Sequence: Synthetic oligonucleotide
  Description of Combined DNA/RNA Molecule: Synthetic oligonucleotide
gaagcucacaaugauuuaatt

SEQ ID NO: 685 - DNA, 21 bp, Artificial Sequence
  Description of Artificial Sequence: Synthetic oligonucleotide
  Description of Combined DNA/RNA Molecule: Synthetic oligonucleotide
uuaaaucauugugagcuuctt

SEQ ID NO: 686 - DNA, 21 bp, Artificial Sequence
  Description of Artificial Sequence: Synthetic oligonucleotide
  Description of Combined DNA/RNA Molecule: Synthetic oligonucleotide
acauguaucuuuuucucgatt

SEQ ID NO: 687 - DNA, 21 bp, Artificial Sequence
  Description of Artificial Sequence: Synthetic oligonucleotide
  Description of Combined DNA/RNA Molecule: Synthetic oligonucleotide
ucgagaaaaagauacaugutt

SEQ ID NO: 688 - DNA, 21 bp, Artificial Sequence
  Description of Artificial Sequence: Synthetic oligonucleotide
  Description of Combined DNA/RNA Molecule: Synthetic oligonucleotide
ucgauucaaaucuuaaccctt

SEQ ID NO: 689 - DNA, 21 bp, Artificial Sequence
  Description of Artificial Sequence: Synthetic oligonucleotide
  Description of Combined DNA/RNA Molecule: Synthetic oligonucleotide
ggguuaagauuugaaucgatt

SEQ ID NO: 690 - DNA, 21 bp, Artificial Sequence
  Description of Artificial Sequence: Synthetic oligonucleotide
  Description of Combined DNA/RNA Molecule: Synthetic oligonucleotide
ucuuaacccuuaggacucutt

SEQ ID NO: 691 - DNA, 21 bp, Artificial Sequence
  Description of Artificial Sequence: Synthetic oligonucleotide
  Description of Combined DNA/RNA Molecule: Synthetic oligonucleotide
agaguccuaaggguuaagatt

SEQ ID NO: 692 - DNA, 21 bp, Artificial Sequence
  Description of Artificial Sequence: Synthetic oligonucleotide
  Description of Combined DNA/RNA Molecule: Synthetic oligonucleotide
gcucacgaugaguuuagugtt

SEQ ID NO: 693 - DNA, 21 bp, Artificial Sequence
  Description of Artificial Sequence: Synthetic oligonucleotide
  Description of Combined DNA/RNA Molecule: Synthetic oligonucleotide
cacuaaacucaucgugagctt

SEQ ID NO: 694 - DNA, 21 bp, Artificial Sequence
  Description of Artificial Sequence: Synthetic oligonucleotide
  Description of Combined DNA/RNA Molecule: Synthetic oligonucleotide
cauaagcgauggauaauactt

SEQ ID NO: 695 - DNA, 21 bp, Artificial Sequence
  Description of Artificial Sequence: Synthetic oligonucleotide
  Description of Combined DNA/RNA Molecule: Synthetic oligonucleotide
guauuauccaucgcuuaugtt

SEQ ID NO: 696 - DNA, 21 bp, Artificial Sequence
  Description of Artificial Sequence: Synthetic oligonucleotide
  Description of Combined DNA/RNA Molecule: Synthetic oligonucleotide
auaagcgauggauaauacctt

SEQ ID NO: 697 - DNA, 21 bp, Artificial Sequence
  Description of Artificial Sequence: Synthetic oligonucleotide
  Description of Combined DNA/RNA Molecule: Synthetic oligonucleotide
gguauuauccaucgcuuautt

SEQ ID NO: 698 - DNA, 21 bp, Artificial Sequence
  Description of Artificial Sequence: Synthetic oligonucleotide
  Description of Combined DNA/RNA Molecule: Synthetic oligonucleotide
ccuaauaaacugcccucagtt

SEQ ID NO: 699 - DNA, 21 bp, Artificial Sequence
  Description of Artificial Sequence: Synthetic oligonucleotide
  Description of Combined DNA/RNA Molecule: Synthetic oligonucleotide
cugagggcaguuuauuaggtt

SEQ ID NO: 700 - DNA, 21 bp, Artificial Sequence
  Description of Artificial Sequence: Synthetic oligonucleotide
  Description of Combined DNA/RNA Molecule: Synthetic oligonucleotide
ucggaaaguugaacuuggutt

SEQ ID NO: 701 - DNA, 21 bp, Artificial Sequence
  Description of Artificial Sequence: Synthetic oligonucleotide
  Description of Combined DNA/RNA Molecule: Synthetic oligonucleotide
accaaguucaacuuuccgatt

SEQ ID NO: 702 - DNA, 21 bp, Artificial Sequence
  Description of Artificial Sequence: Synthetic oligonucleotide
  Description of Combined DNA/RNA Molecule: Synthetic oligonucleotide
gaaaacauuggccguucugtt

SEQ ID NO: 703 - DNA, 21 bp, Artificial Sequence
  Description of Artificial Sequence: Synthetic oligonucleotide
  Description of Combined DNA/RNA Molecule: Synthetic oligonucleotide
cagaacggccaauguuuuctt

SEQ ID NO: 704 - DNA, 21 bp, Artificial Sequence
  Description of Artificial Sequence: Synthetic oligonucleotide
  Description of Combined DNA/RNA Molecule: Synthetic oligonucleotide
aagacugaucuucuaaguutt

SEQ ID NO: 705 - DNA, 21 bp, Artificial Sequence
  Description of Artificial Sequence: Synthetic oligonucleotide
  Description of Combined DNA/RNA Molecule: Synthetic oligonucleotide
aacuuagaagaucagucuutt

SEQ ID NO: 706 - DNA, 21 bp, Artificial Sequence
  Description of Artificial Sequence: Synthetic oligonucleotide
  Description of Combined DNA/RNA Molecule: Synthetic oligonucleotide
gagcuuguuaaaaucggaatt

SEQ ID NO: 707 - DNA, 21 bp, Artificial Sequence
  Description of Artificial Sequence: Synthetic oligonucleotide
  Description of Combined DNA/RNA Molecule: Synthetic oligonucleotide
uuccgauuuuaacaagcuctt

SEQ ID NO: 708 - DNA, 21 bp, Artificial Sequence
  Description of Artificial Sequence: Synthetic oligonucleotide
  Description of Combined DNA/RNA Molecule: Synthetic oligonucleotide
acauuggccguucuggagctt

SEQ ID NO: 709 - DNA, 21 bp, Artificial Sequence
  Description of Artificial Sequence: Synthetic oligonucleotide
  Description of Combined DNA/RNA Molecule: Synthetic oligonucleotide
gcuccagaacggccaaugutt

SEQ ID NO: 710 - DNA, 21 bp, Artificial Sequence
  Description of Artificial Sequence: Synthetic oligonucleotide
  Description of Combined DNA/RNA Molecule: Synthetic oligonucleotide
aagaacaucuauaauugcatt

SEQ ID NO: 711 - DNA, 21 bp, Artificial Sequence
  Description of Artificial Sequence: Synthetic oligonucleotide
  Description of Combined DNA/RNA Molecule: Synthetic oligonucleotide
ugcaauuauagauguucuutt

SEQ ID NO: 712 - DNA, 21 bp, Artificial Sequence
  Description of Artificial Sequence: Synthetic oligonucleotide
  Description of Combined DNA/RNA Molecule: Synthetic oligonucleotide
aaaugugucuacucauguutt

SEQ ID NO: 713 - DNA, 21 bp, Artificial Sequence
  Description of Artificial Sequence: Synthetic oligonucleotide
  Description of Combined DNA/RNA Molecule: Synthetic oligonucleotide
aacaugaguagacacauuutt

SEQ ID NO: 714 - DNA, 21 bp, Artificial Sequence
  Description of Artificial Sequence: Synthetic oligonucleotide
  Description of Combined DNA/RNA Molecule: Synthetic oligonucleotide
ugucuacucauguuucucatt

SEQ ID NO: 715 - DNA, 21 bp, Artificial Sequence
  Description of Artificial Sequence: Synthetic oligonucleotide
  Description of Combined DNA/RNA Molecule: Synthetic oligonucleotide
ugagaaacaugaguagacatt

SEQ ID NO: 716 - DNA, 21 bp, Artificial Sequence
  Description of Artificial Sequence: Synthetic oligonucleotide
  Description of Combined DNA/RNA Molecule: Synthetic oligonucleotide
guauacuguguaacaaucutt

SEQ ID NO: 717 - DNA, 21 bp, Artificial Sequence
  Description of Artificial Sequence: Synthetic oligonucleotide
  Description of Combined DNA/RNA Molecule: Synthetic oligonucleotide
agauuguuacacaguauactt

SEQ ID NO: 718 - DNA, 21 bp, Artificial Sequence
  Description of Artificial Sequence: Synthetic oligonucleotide
  Description of Combined DNA/RNA Molecule: Synthetic oligonucleotide
uauacuguguaacaaucuatt

SEQ ID NO: 719 - DNA, 21 bp, Artificial Sequence
  Description of Artificial Sequence: Synthetic oligonucleotide
  Description of Combined DNA/RNA Molecule: Synthetic oligonucleotide
uagauuguuacacaguauatt

SEQ ID NO: 720 - DNA, 21 bp, Artificial Sequence
  Description of Artificial Sequence: Synthetic oligonucleotide
  Description of Combined DNA/RNA Molecule: Synthetic oligonucleotide
cuuaguaguguccaggaaatt

SEQ ID NO: 721 - DNA, 21 bp, Artificial Sequence
  Description of Artificial Sequence: Synthetic oligonucleotide
  Description of Combined DNA/RNA Molecule: Synthetic oligonucleotide
uuuccuggacacuacuaagtt

SEQ ID NO: 722 - DNA, 21 bp, Artificial Sequence
  Description of Artificial Sequence: Synthetic oligonucleotide
  Description of Combined DNA/RNA Molecule: Synthetic oligonucleotide
ucagauggacguaaggcagtt

SEQ ID NO: 723 - DNA, 21 bp, Artificial Sequence
  Description of Artificial Sequence: Synthetic oligonucleotide
  Description of Combined DNA/RNA Molecule: Synthetic oligonucleotide
cugccuuacguccaucugatt

SEQ ID NO: 724 - DNA, 21 bp, Artificial Sequence
  Description of Artificial Sequence: Synthetic oligonucleotide
  Description of Combined DNA/RNA Molecule: Synthetic oligonucleotide
agauaaauugauagcacaatt

SEQ ID NO: 725 - DNA, 21 bp, Artificial Sequence
  Description of Artificial Sequence: Synthetic oligonucleotide
  Description of Combined DNA/RNA Molecule: Synthetic oligonucleotide
uugugcuaucaauuuaucutt

SEQ ID NO: 726 - DNA, 21 bp, Artificial Sequence
  Description of Artificial Sequence: Synthetic oligonucleotide
  Description of Combined DNA/RNA Molecule: Synthetic oligonucleotide
caacagguacgacaccacatt

SEQ ID NO: 727 - DNA, 21 bp, Artificial Sequence
  Description of Artificial Sequence: Synthetic oligonucleotide
  Description of Combined DNA/RNA Molecule: Synthetic oligonucleotide
uguggugucguaccuguugtt

SEQ ID NO: 728 - DNA, 21 bp, Artificial Sequence
  Description of Artificial Sequence: Synthetic oligonucleotide
  Description of Combined DNA/RNA Molecule: Synthetic oligonucleotide
ugcaauguaaauacguauutt

SEQ ID NO: 729 - DNA, 21 bp, Artificial Sequence
  Description of Artificial Sequence: Synthetic oligonucleotide
  Description of Combined DNA/RNA Molecule: Synthetic oligonucleotide
aauacguauuuacauugcatt

SEQ ID NO: 730 - DNA, 21 bp, Artificial Sequence
  Description of Artificial Sequence: Synthetic oligonucleotide
  Description of Combined DNA/RNA Molecule: Synthetic oligonucleotide
agucagaauuuuaucuagatt

SEQ ID NO: 731 - DNA, 21 bp, Artificial Sequence
  Description of Artificial Sequence: Synthetic oligonucleotide
  Description of Combined DNA/RNA Molecule: Synthetic oligonucleotide
ucuagauaaaauucugacutt

SEQ ID NO: 732 - DNA, 21 bp, Artificial Sequence
  Description of Artificial Sequence: Synthetic oligonucleotide
  Description of Combined DNA/RNA Molecule: Synthetic oligonucleotide
cuagaaaucuuuuaacacctt

SEQ ID NO: 733 - DNA, 21 bp, Artificial Sequence
  Description of Artificial Sequence: Synthetic oligonucleotide
  Description of Combined DNA/RNA Molecule: Synthetic oligonucleotide
gguguuaaaagauuucuagtt

SEQ ID NO: 734 - DNA, 21 bp, Artificial Sequence
  Description of Artificial Sequence: Synthetic oligonucleotide
  Description of Combined DNA/RNA Molecule: Synthetic oligonucleotide
aauaaaucuaacccuaguutt

SEQ ID NO: 735 - DNA, 21 bp, Artificial Sequence
  Description of Artificial Sequence: Synthetic oligonucleotide
  Description of Combined DNA/RNA Molecule: Synthetic oligonucleotide
aacuaggguuagauuuauutt

SEQ ID NO: 736 - DNA, 21 bp, Artificial Sequence
  Description of Artificial Sequence: Synthetic oligonucleotide
  Description of Combined DNA/RNA Molecule: Synthetic oligonucleotide
aauuuucugcucacgaugatt

SEQ ID NO: 737 - DNA, 21 bp, Artificial Sequence
  Description of Artificial Sequence: Synthetic oligonucleotide
  Description of Combined DNA/RNA Molecule: Synthetic oligonucleotide
ucaucgugagcagaaaauutt

SEQ ID NO: 738 - DNA, 21 bp, Artificial Sequence
  Description of Artificial Sequence: Synthetic oligonucleotide
  Description of Combined DNA/RNA Molecule: Synthetic oligonucleotide
gcccucaguaaauccauggtt

SEQ ID NO: 739 - DNA, 21 bp, Artificial Sequence
  Description of Artificial Sequence: Synthetic oligonucleotide
  Description of Combined DNA/RNA Molecule: Synthetic oligonucleotide
ccauggauuuacugagggctt

SEQ ID NO: 740 - DNA, 21 bp, Artificial Sequence
  Description of Artificial Sequence: Synthetic oligonucleotide
  Description of Combined DNA/RNA Molecule: Synthetic oligonucleotide
acguuuaaaacgagaucuutt

SEQ ID NO: 741 - DNA, 21 bp, Artificial Sequence
  Description of Artificial Sequence: Synthetic oligonucleotide
  Description of Combined DNA/RNA Molecule: Synthetic oligonucleotide
aagaucucguuuuaaacgutt

SEQ ID NO: 742 - DNA, 21 bp, Artificial Sequence
  Description of Artificial Sequence: Synthetic oligonucleotide
  Description of Combined DNA/RNA Molecule: Synthetic oligonucleotide
aggagauagaacguuuaaatt

SEQ ID NO: 743 - DNA, 21 bp, Artificial Sequence
  Description of Artificial Sequence: Synthetic oligonucleotide
  Description of Combined DNA/RNA Molecule: Synthetic oligonucleotide
uuuaaacguucuaucuccutt

SEQ ID NO: 744 - DNA, 21 bp, Artificial Sequence
  Description of Artificial Sequence: Synthetic oligonucleotide
  Description of Combined DNA/RNA Molecule: Synthetic oligonucleotide
gaccgucauggcgucgcagtt

SEQ ID NO: 745 - DNA, 21 bp, Artificial Sequence
  Description of Artificial Sequence: Synthetic oligonucleotide
  Description of Combined DNA/RNA Molecule: Synthetic oligonucleotide
cugcgacgccaugacgguctt

SEQ ID NO: 746 - DNA, 21 bp, Artificial Sequence
  Description of Artificial Sequence: Synthetic oligonucleotide
  Description of Combined DNA/RNA Molecule: Synthetic oligonucleotide
accgucauggcgucgcagctt

SEQ ID NO: 747 - DNA, 21 bp, Artificial Sequence
  Description of Artificial Sequence: Synthetic oligonucleotide
  Description of Combined DNA/RNA Molecule: Synthetic oligonucleotide
gcugcgacgccaugacggutt

SEQ ID NO: 748 - DNA, 21 bp, Artificial Sequence
  Description of Artificial Sequence: Synthetic oligonucleotide
  Description of Combined DNA/RNA Molecule: Synthetic oligonucleotide
gaacguuuaaaacgagauctt

SEQ ID NO: 749 - DNA, 21 bp, Artificial Sequence
  Description of Artificial Sequence: Synthetic oligonucleotide
  Description of Combined DNA/RNA Molecule: Synthetic oligonucleotide
gaucucguuuuaaacguuctt

SEQ ID NO: 750 - DNA, 21 bp, Artificial Sequence
  Description of Artificial Sequence: Synthetic oligonucleotide
  Description of Combined DNA/RNA Molecule: Synthetic oligonucleotide
uugagcuuaacauagguaatt

SEQ ID NO: 751 - DNA, 21 bp, Artificial Sequence
  Description of Artificial Sequence: Synthetic oligonucleotide
  Description of Combined DNA/RNA Molecule: Synthetic oligonucleotide
uuaccuauguuaagcucaatt

SEQ ID NO: 752 - DNA, 21 bp, Artificial Sequence
  Description of Artificial Sequence: Synthetic oligonucleotide
  Description of Combined DNA/RNA Molecule: Synthetic oligonucleotide
acuaaauugaucucguagatt

SEQ ID NO: 753 - DNA, 21 bp, Artificial Sequence
  Description of Artificial Sequence: Synthetic oligonucleotide
  Description of Combined DNA/RNA Molecule: Synthetic oligonucleotide
ucuacgagaucaauuuagutt

SEQ ID NO: 754 - DNA, 21 bp, Artificial Sequence
  Description of Artificial Sequence: Synthetic oligonucleotide
  Description of Combined DNA/RNA Molecule: Synthetic oligonucleotide
ucguagaauuaucuuaauatt

SEQ ID NO: 755 - DNA, 21 bp, Artificial Sequence
  Description of Artificial Sequence: Synthetic oligonucleotide
  Description of Combined DNA/RNA Molecule: Synthetic oligonucleotide
uauuaagauaauucuacgatt

SEQ ID NO: 756 - DNA, 21 bp, Artificial Sequence
  Description of Artificial Sequence: Synthetic oligonucleotide
  Description of Combined DNA/RNA Molecule: Synthetic oligonucleotide
ggagauagaacguuuaaaatt

SEQ ID NO: 757 - DNA, 21 bp, Artificial Sequence
  Description of Artificial Sequence: Synthetic oligonucleotide
  Description of Combined DNA/RNA Molecule: Synthetic oligonucleotide
uuuuaaacguucuaucucctt

SEQ ID NO: 758 - DNA, 21 bp, Artificial Sequence
  Description of Artificial Sequence: Synthetic oligonucleotide
  Description of Combined DNA/RNA Molecule: Synthetic oligonucleotide
acaacuuauuggagguugutt

SEQ ID NO: 759 - DNA, 21 bp, Artificial Sequence
  Description of Artificial Sequence: Synthetic oligonucleotide
  Description of Combined DNA/RNA Molecule: Synthetic oligonucleotide
acaaccuccaauaaguugutt

SEQ ID NO: 760 - DNA, 21 bp, Artificial Sequence
  Description of Artificial Sequence: Synthetic oligonucleotide
  Description of Combined DNA/RNA Molecule: Synthetic oligonucleotide
ugagcuuaacauagguaaatt

SEQ ID NO: 761 - DNA, 21 bp, Artificial Sequence
  Description of Artificial Sequence: Synthetic oligonucleotide
  Description of Combined DNA/RNA Molecule: Synthetic oligonucleotide
uuuaccuauguuaagcucatt

SEQ ID NO: 762 - DNA, 21 bp, Artificial Sequence
  Description of Artificial Sequence: Synthetic oligonucleotide
  Description of Combined DNA/RNA Molecule: Synthetic oligonucleotide
aucucguagaauuaucuuatt

SEQ ID NO: 763 - DNA, 21 bp, Artificial Sequence
  Description of Artificial Sequence: Synthetic oligonucleotide
  Description of Combined DNA/RNA Molecule: Synthetic oligonucleotide
uaagauaauucuacgagautt

SEQ ID NO: 764 - DNA, 21 bp, Artificial Sequence
  Description of Artificial Sequence: Synthetic oligonucleotide
  Description of Combined DNA/RNA Molecule: Synthetic oligonucleotide
cugcgugcagucgguccuctt

SEQ ID NO: 765 - DNA, 21 bp, Artificial Sequence
  Description of Artificial Sequence: Synthetic oligonucleotide
  Description of Combined DNA/RNA Molecule: Synthetic oligonucleotide
gaggaccgacugcacgcagtt

SEQ ID NO: 766 - DNA, 21 bp, Artificial Sequence
  Description of Artificial Sequence: Synthetic oligonucleotide
  Description of Combined DNA/RNA Molecule: Synthetic oligonucleotide
cacgcagcgcccgagaguatt

SEQ ID NO: 767 - DNA, 21 bp, Artificial Sequence
  Description of Artificial Sequence: Synthetic oligonucleotide
  Description of Combined DNA/RNA Molecule: Synthetic oligonucleotide
uacucucgggcgcugcgugtt

SEQ ID NO: 768 - DNA, 21 bp, Artificial Sequence
  Description of Artificial Sequence: Synthetic oligonucleotide
  Description of Combined DNA/RNA Molecule: Synthetic oligonucleotide
aguaccagggagacuccggtt

SEQ ID NO: 769 - DNA, 21 bp, Artificial Sequence
  Description of Artificial Sequence: Synthetic oligonucleotide
  Description of Combined DNA/RNA Molecule: Synthetic oligonucleotide
ccggagucucccugguacutt

SEQ ID NO: 770 - DNA, 21 bp, Artificial Sequence
  Description of Artificial Sequence: Synthetic oligonucleotide
  Description of Combined DNA/RNA Molecule: Synthetic oligonucleotide
acggaggagauagaacguutt

SEQ ID NO: 771 - DNA, 21 bp, Artificial Sequence
  Description of Artificial Sequence: Synthetic oligonucleotide
  Description of Combined DNA/RNA Molecule: Synthetic oligonucleotide
aacguucuaucuccuccgutt

SEQ ID NO: 772 - DNA, 21 bp, Artificial Sequence
  Description of Artificial Sequence: Synthetic oligonucleotide
  Description of Combined DNA/RNA Molecule: Synthetic oligonucleotide
agaacguuuaaaacgagautt

SEQ ID NO: 773 - DNA, 21 bp, Artificial Sequence
  Description of Artificial Sequence: Synthetic oligonucleotide
  Description of Combined DNA/RNA Molecule: Synthetic oligonucleotide
aucucguuuuaaacguucutt

SEQ ID NO: 774 - DNA, 21 bp, Artificial Sequence
  Description of Artificial Sequence: Synthetic oligonucleotide
  Description of Combined DNA/RNA Molecule: Synthetic oligonucleotide
aacguuuaaaacgagaucutt

SEQ ID NO: 775 - DNA, 21 bp, Artificial Sequence
  Description of Artificial Sequence: Synthetic oligonucleotide
  Description of Combined DNA/RNA Molecule: Synthetic oligonucleotide
agaucucguuuuaaacguutt

SEQ ID NO: 776 - DNA, 21 bp, Artificial Sequence
  Description of Artificial Sequence: Synthetic oligonucleotide
  Description of Combined DNA/RNA Molecule: Synthetic oligonucleotide
agcuugagcuuaacauaggtt

SEQ ID NO: 777 - DNA, 21 bp, Artificial Sequence
  Description of Artificial Sequence: Synthetic oligonucleotide
  Description of Combined DNA/RNA Molecule: Synthetic oligonucleotide
ccuauguuaagcucaagcutt

SEQ ID NO: 778 - DNA, 21 bp, Artificial Sequence
  Description of Artificial Sequence: Synthetic oligonucleotide
  Description of Combined DNA/RNA Molecule: Synthetic oligonucleotide
agcuuaacauagguaaauatt

SEQ ID NO: 779 - DNA, 21 bp, Artificial Sequence
  Description of Artificial Sequence: Synthetic oligonucleotide
  Description of Combined DNA/RNA Molecule: Synthetic oligonucleotide
uauuuaccuauguuaagcutt

SEQ ID NO: 780 - DNA, 21 bp, Artificial Sequence
  Description of Artificial Sequence: Synthetic oligonucleotide
  Description of Combined DNA/RNA Molecule: Synthetic oligonucleotide
uagagcuacaaaaccuauctt

SEQ ID NO: 781 - DNA, 21 bp, Artificial Sequence
  Description of Artificial Sequence: Synthetic oligonucleotide
  Description of Combined DNA/RNA Molecule: Synthetic oligonucleotide
gauagguuuuguagcucuatt

SEQ ID NO: 782 - DNA, 21 bp, Artificial Sequence
  Description of Artificial Sequence: Synthetic oligonucleotide
  Description of Combined DNA/RNA Molecule: Synthetic oligonucleotide
uaguuguaucccuccuuuatt

SEQ ID NO: 783 - DNA, 21 bp, Artificial Sequence
  Description of Artificial Sequence: Synthetic oligonucleotide
  Description of Combined DNA/RNA Molecule: Synthetic oligonucleotide
uaaaggagggauacaacuatt

SEQ ID NO: 784 - DNA, 21 bp, Artificial Sequence
  Description of Artificial Sequence: Synthetic oligonucleotide
  Description of Combined DNA/RNA Molecule: Synthetic oligonucleotide
accacccagacaucugacutt

SEQ ID NO: 785 - DNA, 21 bp, Artificial Sequence
  Description of Artificial Sequence: Synthetic oligonucleotide
  Description of Combined DNA/RNA Molecule: Synthetic oligonucleotide
agucagaugucuggguggutt

SEQ ID NO: 786 - DNA, 21 bp, Artificial Sequence
  Description of Artificial Sequence: Synthetic oligonucleotide
  Description of Combined DNA/RNA Molecule: Synthetic oligonucleotide
agaaacuaaauugaucucgtt

SEQ ID NO: 787 - DNA, 21 bp, Artificial Sequence
  Description of Artificial Sequence: Synthetic oligonucleotide
  Description of Combined DNA/RNA Molecule: Synthetic oligonucleotide
cgagaucaauuuaguuucutt

SEQ ID NO: 788 - DNA, 21 bp, Artificial Sequence
  Description of Artificial Sequence: Synthetic oligonucleotide
  Description of Combined DNA/RNA Molecule: Synthetic oligonucleotide
ucucguagaauuaucuuaatt

SEQ ID NO: 789 - DNA, 21 bp, Artificial Sequence
  Description of Artificial Sequence: Synthetic oligonucleotide
  Description of Combined DNA/RNA Molecule: Synthetic oligonucleotide
uuaagauaauucuacgagatt

SEQ ID NO: 790 - DNA, 21 bp, Artificial Sequence
  Description of Artificial Sequence: Synthetic oligonucleotide
  Description of Combined DNA/RNA Molecule: Synthetic oligonucleotide
caacuuauuggagguuguatt

SEQ ID NO: 791 - DNA, 21 bp, Artificial Sequence
  Description of Artificial Sequence: Synthetic oligonucleotide
  Description of Combined DNA/RNA Molecule: Synthetic oligonucleotide
uacaaccuccaauaaguugtt

SEQ ID NO: 792 - DNA, 21 bp, Artificial Sequence
  Description of Artificial Sequence: Synthetic oligonucleotide
  Description of Combined DNA/RNA Molecule: Synthetic oligonucleotide
uuguaucccuccuuuaagutt

SEQ ID NO: 793 - DNA, 21 bp, Artificial Sequence
  Description of Artificial Sequence: Synthetic oligonucleotide
  Description of Combined DNA/RNA Molecule: Synthetic oligonucleotide
acuuaaaggagggauacaatt

SEQ ID NO: 794 - DNA, 21 bp, Artificial Sequence
  Description of Artificial Sequence: Synthetic oligonucleotide
  Description of Combined DNA/RNA Molecule: Synthetic oligonucleotide
ucacaacuuauuggagguutt

SEQ ID NO: 795 - DNA, 21 bp, Artificial Sequence
  Description of Artificial Sequence: Synthetic oligonucleotide
  Description of Combined DNA/RNA Molecule: Synthetic oligonucleotide
aaccuccaauaaguugugatt

SEQ ID NO: 796 - DNA, 21 bp, Artificial Sequence
  Description of Artificial Sequence: Synthetic oligonucleotide
  Description of Combined DNA/RNA Molecule: Synthetic oligonucleotide
agaacuguacucuucucagtt

SEQ ID NO: 797 - DNA, 21 bp, Artificial Sequence
  Description of Artificial Sequence: Synthetic oligonucleotide
  Description of Combined DNA/RNA Molecule: Synthetic oligonucleotide
cugagaagaguacaguucutt

SEQ ID NO: 798 - DNA, 21 bp, Artificial Sequence
  Description of Artificial Sequence: Synthetic oligonucleotide
  Description of Combined DNA/RNA Molecule: Synthetic oligonucleotide
gagcuuaacauagguaaautt

SEQ ID NO: 799 - DNA, 21 bp, Artificial Sequence
  Description of Artificial Sequence: Synthetic oligonucleotide
  Description of Combined DNA/RNA Molecule: Synthetic oligonucleotide
auuuaccuauguuaagcuctt

SEQ ID NO: 800 - DNA, 21 bp, Artificial Sequence
  Description of Artificial Sequence: Synthetic oligonucleotide
  Description of Combined DNA/RNA Molecule: Synthetic oligonucleotide
caccaacaucuguccuuagtt

SEQ ID NO: 801 - DNA, 21 bp, Artificial Sequence
  Description of Artificial Sequence: Synthetic oligonucleotide
  Description of Combined DNA/RNA Molecule: Synthetic oligonucleotide
cuaaggacagauguuggugtt

SEQ ID NO: 802 - DNA, 21 bp, Artificial Sequence
  Description of Artificial Sequence: Synthetic oligonucleotide
  Description of Combined DNA/RNA Molecule: Synthetic oligonucleotide
aaagcccacuuuagaguautt

SEQ ID NO: 803 - DNA, 21 bp, Artificial Sequence
  Description of Artificial Sequence: Synthetic oligonucleotide
  Description of Combined DNA/RNA Molecule: Synthetic oligonucleotide
auacucuaaagugggcuuutt

SEQ ID NO: 804 - DNA, 21 bp, Artificial Sequence
  Description of Artificial Sequence: Synthetic oligonucleotide
  Description of Combined DNA/RNA Molecule: Synthetic oligonucleotide
aagcccacuuuagaguauatt

SEQ ID NO: 805 - DNA, 21 bp, Artificial Sequence
  Description of Artificial Sequence: Synthetic oligonucleotide
  Description of Combined DNA/RNA Molecule: Synthetic oligonucleotide
uauacucuaaagugggcuutt

SEQ ID NO: 806 - DNA, 21 bp, Artificial Sequence
  Description of Artificial Sequence: Synthetic oligonucleotide
  Description of Combined DNA/RNA Molecule: Synthetic oligonucleotide
gaccuuauuugguaaucugtt

SEQ ID NO: 807 - DNA, 21 bp, Artificial Sequence
  Description of Artificial Sequence: Synthetic oligonucleotide
  Description of Combined DNA/RNA Molecule: Synthetic oligonucleotide
cagauuaccaaauaagguctt

SEQ ID NO: 808 - DNA, 21 bp, Artificial Sequence
  Description of Artificial Sequence: Synthetic oligonucleotide
  Description of Combined DNA/RNA Molecule: Synthetic oligonucleotide
gauuaauguacucaagacutt

SEQ ID NO: 809 - DNA, 21 bp, Artificial Sequence
  Description of Artificial Sequence: Synthetic oligonucleotide
  Description of Combined DNA/RNA Molecule: Synthetic oligonucleotide
agucuugaguacauuaauctt

SEQ ID NO: 810 - DNA, 21 bp, Artificial Sequence
  Description of Artificial Sequence: Synthetic oligonucleotide
  Description of Combined DNA/RNA Molecule: Synthetic oligonucleotide
cuuuaagaggccuaacucatt

SEQ ID NO: 811 - DNA, 21 bp, Artificial Sequence
  Description of Artificial Sequence: Synthetic oligonucleotide
  Description of Combined DNA/RNA Molecule: Synthetic oligonucleotide
ugaguuaggccucuuaaagtt

SEQ ID NO: 812 - DNA, 21 bp, Artificial Sequence
  Description of Artificial Sequence: Synthetic oligonucleotide
  Description of Combined DNA/RNA Molecule: Synthetic oligonucleotide
uuaaaccaaacccuauugatt

SEQ ID NO: 813 - DNA, 21 bp, Artificial Sequence
  Description of Artificial Sequence: Synthetic oligonucleotide
  Description of Combined DNA/RNA Molecule: Synthetic oligonucleotide
ucaauaggguuugguuuaatt

SEQ ID NO: 814 - DNA, 21 bp, Artificial Sequence
  Description of Artificial Sequence: Synthetic oligonucleotide
  Description of Combined DNA/RNA Molecule: Synthetic oligonucleotide
ucuguuggagaucuauaautt

SEQ ID NO: 815 - DNA, 21 bp, Artificial Sequence
  Description of Artificial Sequence: Synthetic oligonucleotide
  Description of Combined DNA/RNA Molecule: Synthetic oligonucleotide
auuauagaucuccaacagatt

SEQ ID NO: 816 - DNA, 21 bp, Artificial Sequence
  Description of Artificial Sequence: Synthetic oligonucleotide
  Description of Combined DNA/RNA Molecule: Synthetic oligonucleotide
cugauguuucugagagacutt

SEQ ID NO: 817 - DNA, 21 bp, Artificial Sequence
  Description of Artificial Sequence: Synthetic oligonucleotide
  Description of Combined DNA/RNA Molecule: Synthetic oligonucleotide
agucucucagaaacaucagtt

SEQ ID NO: 818 - DNA, 21 bp, Artificial Sequence
  Description of Artificial Sequence: Synthetic oligonucleotide
  Description of Combined DNA/RNA Molecule: Synthetic oligonucleotide
gcauacucuagucguuccctt

SEQ ID NO: 819 - DNA, 21 bp, Artificial Sequence
  Description of Artificial Sequence: Synthetic oligonucleotide
  Description of Combined DNA/RNA Molecule: Synthetic oligonucleotide
gggaacgacuagaguaugctt

SEQ ID NO: 820 - DNA, 21 bp, Artificial Sequence
  Description of Artificial Sequence: Synthetic oligonucleotide
  Description of Combined DNA/RNA Molecule: Synthetic oligonucleotide
guuccuuaucgagaaucuatt

SEQ ID NO: 821 - DNA, 21 bp, Artificial Sequence
  Description of Artificial Sequence: Synthetic oligonucleotide
  Description of Combined DNA/RNA Molecule: Synthetic oligonucleotide
uagauucucgauaaggaactt

SEQ ID NO: 822 - DNA, 21 bp, Artificial Sequence
  Description of Artificial Sequence: Synthetic oligonucleotide
  Description of Combined DNA/RNA Molecule: Synthetic oligonucleotide
gcacuuggaucucucacautt

SEQ ID NO: 823 - DNA, 21 bp, Artificial Sequence
  Description of Artificial Sequence: Synthetic oligonucleotide
  Description of Combined DNA/RNA Molecule: Synthetic oligonucleotide
augugagagauccaagugctt

SEQ ID NO: 824 - DNA, 21 bp, Artificial Sequence
  Description of Artificial Sequence: Synthetic oligonucleotide
  Description of Combined DNA/RNA Molecule: Synthetic oligonucleotide
aaaaaaggaacuagauggctt

SEQ ID NO: 825 - DNA, 21 bp, Artificial Sequence
  Description of Artificial Sequence: Synthetic oligonucleotide
  Description of Combined DNA/RNA Molecule: Synthetic oligonucleotide
gccaucuaguuccuuuuuutt

SEQ ID NO: 826 - DNA, 21 bp, Artificial Sequence
  Description of Artificial Sequence: Synthetic oligonucleotide
  Description of Combined DNA/RNA Molecule: Synthetic oligonucleotide
agagcagauuaccucugcgtt

SEQ ID NO: 827 - DNA, 21 bp, Artificial Sequence
  Description of Artificial Sequence: Synthetic oligonucleotide
  Description of Combined DNA/RNA Molecule: Synthetic oligonucleotide
cgcagagguaaucugcucutt

SEQ ID NO: 828 - DNA, 21 bp, Artificial Sequence
  Description of Artificial Sequence: Synthetic oligonucleotide
  Description of Combined DNA/RNA Molecule: Synthetic oligonucleotide
agcagauuaccucugcgagtt

SEQ ID NO: 829 - DNA, 21 bp, Artificial Sequence
  Description of Artificial Sequence: Synthetic oligonucleotide
  Description of Combined DNA/RNA Molecule: Synthetic oligonucleotide
cucgcagagguaaucugcutt

SEQ ID NO: 830 - DNA, 21 bp, Artificial Sequence
  Description of Artificial Sequence: Synthetic oligonucleotide
  Description of Combined DNA/RNA Molecule: Synthetic oligonucleotide
cccugacagaguucacaaatt

SEQ ID NO: 831 - DNA, 21 bp, Artificial Sequence
  Description of Artificial Sequence: Synthetic oligonucleotide
  Description of Combined DNA/RNA Molecule: Synthetic oligonucleotide
uuugugaacucugucagggtt

SEQ ID NO: 832 - DNA, 21 bp, Artificial Sequence
  Description of Artificial Sequence: Synthetic oligonucleotide
  Description of Combined DNA/RNA Molecule: Synthetic oligonucleotide
guuuaccgaaguguuguuutt

SEQ ID NO: 833 - DNA, 21 bp, Artificial Sequence
  Description of Artificial Sequence: Synthetic oligonucleotide
  Description of Combined DNA/RNA Molecule: Synthetic oligonucleotide
aaacaacacuucgguaaactt

SEQ ID NO: 834 - DNA, 21 bp, Artificial Sequence
  Description of Artificial Sequence: Synthetic oligonucleotide
  Description of Combined DNA/RNA Molecule: Synthetic oligonucleotide
uuacaguacacaacaaggatt

SEQ ID NO: 835 - DNA, 21 bp, Artificial Sequence
  Description of Artificial Sequence: Synthetic oligonucleotide
  Description of Combined DNA/RNA Molecule: Synthetic oligonucleotide
uccuuguuguguacuguaatt

SEQ ID NO: 836 - DNA, 21 bp, Artificial Sequence
  Description of Artificial Sequence: Synthetic oligonucleotide
  Description of Combined DNA/RNA Molecule: Synthetic oligonucleotide
acuggaucguaagaaggcatt

SEQ ID NO: 837 - DNA, 21 bp, Artificial Sequence
  Description of Artificial Sequence: Synthetic oligonucleotide
  Description of Combined DNA/RNA Molecule: Synthetic oligonucleotide
ugccuucuuacgauccagutt

SEQ ID NO: 838 - DNA, 21 bp, Artificial Sequence
  Description of Artificial Sequence: Synthetic oligonucleotide
  Description of Combined DNA/RNA Molecule: Synthetic oligonucleotide
gagcagauuaccucugcgatt

SEQ ID NO: 839 - DNA, 21 bp, Artificial Sequence
  Description of Artificial Sequence: Synthetic oligonucleotide
  Description of Combined DNA/RNA Molecule: Synthetic oligonucleotide
ucgcagagguaaucugcuctt

SEQ ID NO: 840 - DNA, 21 bp, Artificial Sequence
  Description of Artificial Sequence: Synthetic oligonucleotide
  Description of Combined DNA/RNA Molecule: Synthetic oligonucleotide
aaaagaaguuaguguacgatt

SEQ ID NO: 841 - DNA, 21 bp, Artificial Sequence
  Description of Artificial Sequence: Synthetic oligonucleotide
  Description of Combined DNA/RNA Molecule: Synthetic oligonucleotide
ucguacacuaacuucuuuutt

SEQ ID NO: 842 - DNA, 21 bp, Artificial Sequence
  Description of Artificial Sequence: Synthetic oligonucleotide
  Description of Combined DNA/RNA Molecule: Synthetic oligonucleotide
gaccauuuaauuuggcagatt

SEQ ID NO: 843 - DNA, 21 bp, Artificial Sequence
  Description of Artificial Sequence: Synthetic oligonucleotide
  Description of Combined DNA/RNA Molecule: Synthetic oligonucleotide
ucugccaaauuaaaugguctt

SEQ ID NO: 844 - DNA, 21 bp, Artificial Sequence
  Description of Artificial Sequence: Synthetic oligonucleotide
  Description of Combined DNA/RNA Molecule: Synthetic oligonucleotide
gagaggagugauaauuaaatt

SEQ ID NO: 845 - DNA, 21 bp, Artificial Sequence
  Description of Artificial Sequence: Synthetic oligonucleotide
  Description of Combined DNA/RNA Molecule: Synthetic oligonucleotide
uuuaauuaucacuccucuctt

SEQ ID NO: 846 - DNA, 21 bp, Artificial Sequence
  Description of Artificial Sequence: Synthetic oligonucleotide
  Description of Combined DNA/RNA Molecule: Synthetic oligonucleotide
cuggaggauuggcugacaatt

SEQ ID NO: 847 - DNA, 21 bp, Artificial Sequence
  Description of Artificial Sequence: Synthetic oligonucleotide
  Description of Combined DNA/RNA Molecule: Synthetic oligonucleotide
uugucagccaauccuccagtt

SEQ ID NO: 848 - DNA, 21 bp, Artificial Sequence
  Description of Artificial Sequence: Synthetic oligonucleotide
  Description of Combined DNA/RNA Molecule: Synthetic oligonucleotide
cucuagucguucccacucatt

SEQ ID NO: 849 - DNA, 21 bp, Artificial Sequence
  Description of Artificial Sequence: Synthetic oligonucleotide
  Description of Combined DNA/RNA Molecule: Synthetic oligonucleotide
ugagugggaacgacuagagtt

SEQ ID NO: 850 - DNA, 21 bp, Artificial Sequence
  Description of Artificial Sequence: Synthetic oligonucleotide
  Description of Combined DNA/RNA Molecule: Synthetic oligonucleotide
gauaccauuacuacaguagtt

SEQ ID NO: 851 - DNA, 21 bp, Artificial Sequence
  Description of Artificial Sequence: Synthetic oligonucleotide
  Description of Combined DNA/RNA Molecule: Synthetic oligonucleotide
cuacuguaguaaugguauctt

SEQ ID NO: 852 - DNA, 21 bp, Artificial Sequence
  Description of Artificial Sequence: Synthetic oligonucleotide
  Description of Combined DNA/RNA Molecule: Synthetic oligonucleotide
uucgucugcgaagaagaaatt

SEQ ID NO: 853 - DNA, 21 bp, Artificial Sequence
  Description of Artificial Sequence: Synthetic oligonucleotide
  Description of Combined DNA/RNA Molecule: Synthetic oligonucleotide
uuucuucuucgcagacgaatt

SEQ ID NO: 854 - DNA, 21 bp, Artificial Sequence
  Description of Artificial Sequence: Synthetic oligonucleotide
  Description of Combined DNA/RNA Molecule: Synthetic oligonucleotide
gaaaagaaguuaguguacgtt

SEQ ID NO: 855 - DNA, 21 bp, Artificial Sequence
  Description of Artificial Sequence: Synthetic oligonucleotide
  Description of Combined DNA/RNA Molecule: Synthetic oligonucleotide
cguacacuaacuucuuuuctt

SEQ ID NO: 856 - DNA, 21 bp, Artificial Sequence
  Description of Artificial Sequence: Synthetic oligonucleotide
  Description of Combined DNA/RNA Molecule: Synthetic oligonucleotide
ugauguuuaccgaaguguutt

SEQ ID NO: 857 - DNA, 21 bp, Artificial Sequence
  Description of Artificial Sequence: Synthetic oligonucleotide
  Description of Combined DNA/RNA Molecule: Synthetic oligonucleotide
aacacuucgguaaacaucatt

SEQ ID NO: 858 - DNA, 21 bp, Artificial Sequence
  Description of Artificial Sequence: Synthetic oligonucleotide
  Description of Combined DNA/RNA Molecule: Synthetic oligonucleotide
uguuuguccaauucuggautt

SEQ ID NO: 859 - DNA, 21 bp, Artificial Sequence
  Description of Artificial Sequence: Synthetic oligonucleotide
  Description of Combined DNA/RNA Molecule: Synthetic oligonucleotide
auccagaauuggacaaacatt

SEQ ID NO: 860 - DNA, 21 bp, Artificial Sequence
  Description of Artificial Sequence: Synthetic oligonucleotide
  Description of Combined DNA/RNA Molecule: Synthetic oligonucleotide
augaagaguauaccugggatt

SEQ ID NO: 861 - DNA, 21 bp, Artificial Sequence
  Description of Artificial Sequence: Synthetic oligonucleotide
  Description of Combined DNA/RNA Molecule: Synthetic oligonucleotide
ucccagguauacucuucautt

SEQ ID NO: 862 - DNA, 21 bp, Artificial Sequence
  Description of Artificial Sequence: Synthetic oligonucleotide
  Description of Combined DNA/RNA Molecule: Synthetic oligonucleotide
gcuacucugaugaaugcautt

SEQ ID NO: 863 - DNA, 21 bp, Artificial Sequence
  Description of Artificial Sequence: Synthetic oligonucleotide
  Description of Combined DNA/RNA Molecule: Synthetic oligonucleotide
augcauucaucagaguagctt

SEQ ID NO: 864 - DNA, 21 bp, Artificial Sequence
  Description of Artificial Sequence: Synthetic oligonucleotide
  Description of Combined DNA/RNA Molecule: Synthetic oligonucleotide
gcccuuguagaaagaacactt

SEQ ID NO: 865 - DNA, 21 bp, Artificial Sequence
  Description of Artificial Sequence: Synthetic oligonucleotide
  Description of Combined DNA/RNA Molecule: Synthetic oligonucleotide
guguucuuucuacaagggctt

SEQ ID NO: 866 - DNA, 21 bp, Artificial Sequence
  Description of Artificial Sequence: Synthetic oligonucleotide
  Description of Combined DNA/RNA Molecule: Synthetic oligonucleotide
ucauguuccuuaucgagaatt

SEQ ID NO: 867 - DNA, 21 bp, Artificial Sequence
  Description of Artificial Sequence: Synthetic oligonucleotide
  Description of Combined DNA/RNA Molecule: Synthetic oligonucleotide
uucucgauaaggaacaugatt

SEQ ID NO: 868 - DNA, 21 bp, Artificial Sequence
  Description of Artificial Sequence: Synthetic oligonucleotide
  Description of Combined DNA/RNA Molecule: Synthetic oligonucleotide
gaauaggguuacagaguugtt

SEQ ID NO: 869 - DNA, 21 bp, Artificial Sequence
  Description of Artificial Sequence: Synthetic oligonucleotide
  Description of Combined DNA/RNA Molecule: Synthetic oligonucleotide
caacucuguaacccuauuctt

SEQ ID NO: 870 - DNA, 21 bp, Artificial Sequence
  Description of Artificial Sequence: Synthetic oligonucleotide
  Description of Combined DNA/RNA Molecule: Synthetic oligonucleotide
caaacuggaucguaagaagtt

SEQ ID NO: 871 - DNA, 21 bp, Artificial Sequence
  Description of Artificial Sequence: Synthetic oligonucleotide
  Description of Combined DNA/RNA Molecule: Synthetic oligonucleotide
cuucuuacgauccaguuugtt

SEQ ID NO: 872 - DNA, 21 bp, Artificial Sequence
  Description of Artificial Sequence: Synthetic oligonucleotide
  Description of Combined DNA/RNA Molecule: Synthetic oligonucleotide
cuuauuugguaaucugcugtt

SEQ ID NO: 873 - DNA, 21 bp, Artificial Sequence
  Description of Artificial Sequence: Synthetic oligonucleotide
  Description of Combined DNA/RNA Molecule: Synthetic oligonucleotide
cagcagauuaccaaauaagtt

SEQ ID NO: 874 - DNA, 21 bp, Artificial Sequence
  Description of Artificial Sequence: Synthetic oligonucleotide
  Description of Combined DNA/RNA Molecule: Synthetic oligonucleotide
agcaauguggaaaccuaactt

SEQ ID NO: 875 - DNA, 21 bp, Artificial Sequence
  Description of Artificial Sequence: Synthetic oligonucleotide
  Description of Combined DNA/RNA Molecule: Synthetic oligonucleotide
guuagguuuccacauugcutt

SEQ ID NO: 876 - DNA, 21 bp, Artificial Sequence
  Description of Artificial Sequence: Synthetic oligonucleotide
  Description of Combined DNA/RNA Molecule: Synthetic oligonucleotide
acaauaaagcagacccauutt

SEQ ID NO: 877 - DNA, 21 bp, Artificial Sequence
  Description of Artificial Sequence: Synthetic oligonucleotide
  Description of Combined DNA/RNA Molecule: Synthetic oligonucleotide
aaugggucugcuuuauugutt

SEQ ID NO: 878 - DNA, 21 bp, Artificial Sequence
  Description of Artificial Sequence: Synthetic oligonucleotide
  Description of Combined DNA/RNA Molecule: Synthetic oligonucleotide
aaccacuuaguaguguccatt

SEQ ID NO: 879 - DNA, 21 bp, Artificial Sequence
  Description of Artificial Sequence: Synthetic oligonucleotide
  Description of Combined DNA/RNA Molecule: Synthetic oligonucleotide
uggacacuacuaagugguutt

SEQ ID NO: 880 - DNA, 21 bp, Artificial Sequence
  Description of Artificial Sequence: Synthetic oligonucleotide
  Description of Combined DNA/RNA Molecule: Synthetic oligonucleotide
agucaagagccaucuguagtt

SEQ ID NO: 881 - DNA, 21 bp, Artificial Sequence
  Description of Artificial Sequence: Synthetic oligonucleotide
  Description of Combined DNA/RNA Molecule: Synthetic oligonucleotide
cuacagauggcucuugacutt

SEQ ID NO: 882 - DNA, 21 bp, Artificial Sequence
  Description of Artificial Sequence: Synthetic oligonucleotide
  Description of Combined DNA/RNA Molecule: Synthetic oligonucleotide
cucccuagacuucccuauutt

SEQ ID NO: 883 - DNA, 21 bp, Artificial Sequence
  Description of Artificial Sequence: Synthetic oligonucleotide
  Description of Combined DNA/RNA Molecule: Synthetic oligonucleotide
aauagggaagucuagggagtt

SEQ ID NO: 884 - DNA, 21 bp, Artificial Sequence
  Description of Artificial Sequence: Synthetic oligonucleotide
  Description of Combined DNA/RNA Molecule: Synthetic oligonucleotide
auagcuaaauuaaaccaaatt

SEQ ID NO: 885 - DNA, 21 bp, Artificial Sequence
  Description of Artificial Sequence: Synthetic oligonucleotide
  Description of Combined DNA/RNA Molecule: Synthetic oligonucleotide
uuugguuuaauuuagcuautt

SEQ ID NO: 886 - DNA, 21 bp, Artificial Sequence
  Description of Artificial Sequence: Synthetic oligonucleotide
  Description of Combined DNA/RNA Molecule: Synthetic oligonucleotide
uggcugguauaauuccacgtt

SEQ ID NO: 887 - DNA, 21 bp, Artificial Sequence
  Description of Artificial Sequence: Synthetic oligonucleotide
  Description of Combined DNA/RNA Molecule: Synthetic oligonucleotide
cguggaauuauaccagccatt

SEQ ID NO: 888 - DNA, 21 bp, Artificial Sequence
  Description of Artificial Sequence: Synthetic oligonucleotide
  Description of Combined DNA/RNA Molecule: Synthetic oligonucleotide
uuauuugguaaucugcugutt

SEQ ID NO: 889 - DNA, 21 bp, Artificial Sequence
  Description of Artificial Sequence: Synthetic oligonucleotide
  Description of Combined DNA/RNA Molecule: Synthetic oligonucleotide
acagcagauuaccaaauaatt

SEQ ID NO: 890 - DNA, 21 bp, Artificial Sequence
  Description of Artificial Sequence: Synthetic oligonucleotide
  Description of Combined DNA/RNA Molecule: Synthetic oligonucleotide
aacuagauggcuuucucagtt

SEQ ID NO: 891 - DNA, 21 bp, Artificial Sequence
  Description of Artificial Sequence: Synthetic oligonucleotide
  Description of Combined DNA/RNA Molecule: Synthetic oligonucleotide
cugagaaagccaucuaguutt

SEQ ID NO: 892 - DNA, 21 bp, Artificial Sequence
  Description of Artificial Sequence: Synthetic oligonucleotide
  Description of Combined DNA/RNA Molecule: Synthetic oligonucleotide
ucauggcgucgcagccaaatt

SEQ ID NO: 893 - DNA, 21 bp, Artificial Sequence
  Description of Artificial Sequence: Synthetic oligonucleotide
  Description of Combined DNA/RNA Molecule: Synthetic oligonucleotide
uuuggcugcgacgccaugatt

SEQ ID NO: 894 - DNA, 21 bp, Artificial Sequence
  Description of Artificial Sequence: Synthetic oligonucleotide
  Description of Combined DNA/RNA Molecule: Synthetic oligonucleotide
acuggaggauuggcugacatt

SEQ ID NO: 895 - DNA, 21 bp, Artificial Sequence
  Description of Artificial Sequence: Synthetic oligonucleotide
  Description of Combined DNA/RNA Molecule: Synthetic oligonucleotide
ugucagccaauccuccagutt

SEQ ID NO: 896 - DNA, 21 bp, Artificial Sequence
  Description of Artificial Sequence: Synthetic oligonucleotide
  Description of Combined DNA/RNA Molecule: Synthetic oligonucleotide
cuauaauugcacuaucuuutt

SEQ ID NO: 897 - DNA, 21 bp, Artificial Sequence
  Description of Artificial Sequence: Synthetic oligonucleotide
  Description of Combined DNA/RNA Molecule: Synthetic oligonucleotide
aaagauagugcaauuauagtt

SEQ ID NO: 898 - DNA, 21 bp, Artificial Sequence
  Description of Artificial Sequence: Synthetic oligonucleotide
  Description of Combined DNA/RNA Molecule: Synthetic oligonucleotide
aaaggucaccuaaugaagatt

SEQ ID NO: 899 - DNA, 21 bp, Artificial Sequence
  Description of Artificial Sequence: Synthetic oligonucleotide
  Description of Combined DNA/RNA Molecule: Synthetic oligonucleotide
ucuucauuaggugaccuuutt

SEQ ID NO: 900 - DNA, 21 bp, Artificial Sequence
  Description of Artificial Sequence: Synthetic oligonucleotide
  Description of Combined DNA/RNA Molecule: Synthetic oligonucleotide
augaaugcauacucuaguctt

SEQ ID NO: 901 - DNA, 21 bp, Artificial Sequence
  Description of Artificial Sequence: Synthetic oligonucleotide
  Description of Combined DNA/RNA Molecule: Synthetic oligonucleotide
gacuagaguaugcauucautt

SEQ ID NO: 902 - DNA, 21 bp, Artificial Sequence
  Description of Artificial Sequence: Synthetic oligonucleotide
  Description of Combined DNA/RNA Molecule: Synthetic oligonucleotide
aacauauugaauaagccugtt

SEQ ID NO: 903 - DNA, 21 bp, Artificial Sequence
  Description of Artificial Sequence: Synthetic oligonucleotide
  Description of Combined DNA/RNA Molecule: Synthetic oligonucleotide
caggcuuauucaauauguutt

SEQ ID NO: 904 - DNA, 21 bp, Artificial Sequence
  Description of Artificial Sequence: Synthetic oligonucleotide
  Description of Combined DNA/RNA Molecule: Synthetic oligonucleotide
aagaaggcaguugaccaactt

SEQ ID NO: 905 - DNA, 21 bp, Artificial Sequence
  Description of Artificial Sequence: Synthetic oligonucleotide
  Description of Combined DNA/RNA Molecule: Synthetic oligonucleotide
guuggucaacugccuucuutt

SEQ ID NO: 906 - DNA, 21 bp, Artificial Sequence
  Description of Artificial Sequence: Synthetic oligonucleotide
  Description of Combined DNA/RNA Molecule: Synthetic oligonucleotide
gauacuaaaagaacaaucatt

SEQ ID NO: 907 - DNA, 21 bp, Artificial Sequence
  Description of Artificial Sequence: Synthetic oligonucleotide
  Description of Combined DNA/RNA Molecule: Synthetic oligonucleotide
ugauuguucuuuuaguauctt

SEQ ID NO: 908 - DNA, 21 bp, Artificial Sequence
  Description of Artificial Sequence: Synthetic oligonucleotide
  Description of Combined DNA/RNA Molecule: Synthetic oligonucleotide
auacugaaaaucaauaguctt

SEQ ID NO: 909 - DNA, 21 bp, Artificial Sequence
  Description of Artificial Sequence: Synthetic oligonucleotide
  Description of Combined DNA/RNA Molecule: Synthetic oligonucleotide
gacuauugauuuucaguautt

SEQ ID NO: 910 - DNA, 21 bp, Artificial Sequence
  Description of Artificial Sequence: Synthetic oligonucleotide
  Description of Combined DNA/RNA Molecule: Synthetic oligonucleotide
aaaaaggaacuagauggcutt

SEQ ID NO: 911 - DNA, 21 bp, Artificial Sequence
  Description of Artificial Sequence: Synthetic oligonucleotide
  Description of Combined DNA/RNA Molecule: Synthetic oligonucleotide
agccaucuaguuccuuuuutt

SEQ ID NO: 912 - DNA, 21 bp, Artificial Sequence
  Description of Artificial Sequence: Synthetic oligonucleotide
  Description of Combined DNA/RNA Molecule: Synthetic oligonucleotide
gaacuagauggcuuucucatt

SEQ ID NO: 913 - DNA, 21 bp, Artificial Sequence
  Description of Artificial Sequence: Synthetic oligonucleotide
  Description of Combined DNA/RNA Molecule: Synthetic oligonucleotide
ugagaaagccaucuaguuctt

SEQ ID NO: 914 - DNA, 21 bp, Artificial Sequence
  Description of Artificial Sequence: Synthetic oligonucleotide
  Description of Combined DNA/RNA Molecule: Synthetic oligonucleotide
gaaaccuaacugaagaccutt

SEQ ID NO: 915 - DNA, 21 bp, Artificial Sequence
  Description of Artificial Sequence: Synthetic oligonucleotide
  Description of Combined DNA/RNA Molecule: Synthetic oligonucleotide
aggucuucaguuagguuuctt

SEQ ID NO: 916 - DNA, 21 bp, Artificial Sequence
  Description of Artificial Sequence: Synthetic oligonucleotide
  Description of Combined DNA/RNA Molecule: Synthetic oligonucleotide
uacccaucaacacugguaatt

SEQ ID NO: 917 - DNA, 21 bp, Artificial Sequence
  Description of Artificial Sequence: Synthetic oligonucleotide
  Description of Combined DNA/RNA Molecule: Synthetic oligonucleotide
uuaccaguguugauggguatt

SEQ ID NO: 918 - DNA, 21 bp, Artificial Sequence
  Description of Artificial Sequence: Synthetic oligonucleotide
  Description of Combined DNA/RNA Molecule: Synthetic oligonucleotide
auuuugauaucuacccauutt

SEQ ID NO: 919 - DNA, 21 bp, Artificial Sequence
  Description of Artificial Sequence: Synthetic oligonucleotide
  Description of Combined DNA/RNA Molecule: Synthetic oligonucleotide
aauggguagauaucaaaautt

SEQ ID NO: 920 - DNA, 21 bp, Artificial Sequence
  Description of Artificial Sequence: Synthetic oligonucleotide
  Description of Combined DNA/RNA Molecule: Synthetic oligonucleotide
aucccuauaguucacuuugtt

SEQ ID NO: 921 - DNA, 21 bp, Artificial Sequence
  Description of Artificial Sequence: Synthetic oligonucleotide
  Description of Combined DNA/RNA Molecule: Synthetic oligonucleotide
caaagugaacuauagggautt

SEQ ID NO: 922 - DNA, 21 bp, Artificial Sequence
  Description of Artificial Sequence: Synthetic oligonucleotide
  Description of Combined DNA/RNA Molecule: Synthetic oligonucleotide
augggcuauaauugcacuatt

SEQ ID NO: 923 - DNA, 21 bp, Artificial Sequence
  Description of Artificial Sequence: Synthetic oligonucleotide
  Description of Combined DNA/RNA Molecule: Synthetic oligonucleotide
uagugcaauuauagcccautt

SEQ ID NO: 924 - DNA, 21 bp, Artificial Sequence
  Description of Artificial Sequence: Synthetic oligonucleotide
  Description of Combined DNA/RNA Molecule: Synthetic oligonucleotide
agauuaccucugcgagccctt

SEQ ID NO: 925 - DNA, 21 bp, Artificial Sequence
  Description of Artificial Sequence: Synthetic oligonucleotide
  Description of Combined DNA/RNA Molecule: Synthetic oligonucleotide
gggcucgcagagguaaucutt

SEQ ID NO: 926 - DNA, 21 bp, Artificial Sequence
  Description of Artificial Sequence: Synthetic oligonucleotide
  Description of Combined DNA/RNA Molecule: Synthetic oligonucleotide
uaauuccacguacccuucatt

SEQ ID NO: 927 - DNA, 21 bp, Artificial Sequence
  Description of Artificial Sequence: Synthetic oligonucleotide
  Description of Combined DNA/RNA Molecule: Synthetic oligonucleotide
ugaaggguacguggaauuatt

SEQ ID NO: 928 - DNA, 21 bp, Artificial Sequence
  Description of Artificial Sequence: Synthetic oligonucleotide
  Description of Combined DNA/RNA Molecule: Synthetic oligonucleotide
gucguucccacucaguuuutt

SEQ ID NO: 929 - DNA, 21 bp, Artificial Sequence
  Description of Artificial Sequence: Synthetic oligonucleotide
  Description of Combined DNA/RNA Molecule: Synthetic oligonucleotide
aaaacugagugggaacgactt

SEQ ID NO: 930 - DNA, 21 bp, Artificial Sequence
  Description of Artificial Sequence: Synthetic oligonucleotide
  Description of Combined DNA/RNA Molecule: Synthetic oligonucleotide
aaaucaaucccuguugacutt

SEQ ID NO: 931 - DNA, 21 bp, Artificial Sequence
  Description of Artificial Sequence: Synthetic oligonucleotide
  Description of Combined DNA/RNA Molecule: Synthetic oligonucleotide
agucaacagggauugauuutt

SEQ ID NO: 932 - DNA, 21 bp, Artificial Sequence
  Description of Artificial Sequence: Synthetic oligonucleotide
  Description of Combined DNA/RNA Molecule: Synthetic oligonucleotide
ucauagagcaaagaacauatt

SEQ ID NO: 933 - DNA, 21 bp, Artificial Sequence
  Description of Artificial Sequence: Synthetic oligonucleotide
  Description of Combined DNA/RNA Molecule: Synthetic oligonucleotide
uauguucuuugcucuaugatt

SEQ ID NO: 934 - DNA, 21 bp, Artificial Sequence
  Description of Artificial Sequence: Synthetic oligonucleotide
  Description of Combined DNA/RNA Molecule: Synthetic oligonucleotide
uuacuacaguagcacuuggtt

SEQ ID NO: 935 - DNA, 21 bp, Artificial Sequence
  Description of Artificial Sequence: Synthetic oligonucleotide
  Description of Combined DNA/RNA Molecule: Synthetic oligonucleotide
ccaagugcuacuguaguaatt

SEQ ID NO: 936 - DNA, 21 bp, Artificial Sequence
  Description of Artificial Sequence: Synthetic oligonucleotide
  Description of Combined DNA/RNA Molecule: Synthetic oligonucleotide
auguggaaaccuaacugaatt

SEQ ID NO: 937 - DNA, 21 bp, Artificial Sequence
  Description of Artificial Sequence: Synthetic oligonucleotide
  Description of Combined DNA/RNA Molecule: Synthetic oligonucleotide
uucaguuagguuuccacautt

SEQ ID NO: 938 - DNA, 21 bp, Artificial Sequence
  Description of Artificial Sequence: Synthetic oligonucleotide
  Description of Combined DNA/RNA Molecule: Synthetic oligonucleotide
uguggaaaccuaacugaagtt

SEQ ID NO: 939 - DNA, 21 bp, Artificial Sequence
  Description of Artificial Sequence: Synthetic oligonucleotide
  Description of Combined DNA/RNA Molecule: Synthetic oligonucleotide
cuucaguuagguuuccacatt

SEQ ID NO: 940 - DNA, 21 bp, Artificial Sequence
  Description of Artificial Sequence: Synthetic oligonucleotide
  Description of Combined DNA/RNA Molecule: Synthetic oligonucleotide
ucuuccuuaaaugaaagggtt

SEQ ID NO: 941 - DNA, 21 bp, Artificial Sequence
  Description of Artificial Sequence: Synthetic oligonucleotide
  Description of Combined DNA/RNA Molecule: Synthetic oligonucleotide
cccuuucauuuaaggaagatt

SEQ ID NO: 942 - DNA, 21 bp, Artificial Sequence
  Description of Artificial Sequence: Synthetic oligonucleotide
  Description of Combined DNA/RNA Molecule: Synthetic oligonucleotide
ugaagaaccucuaagucaatt

SEQ ID NO: 943 - DNA, 21 bp, Artificial Sequence
  Description of Artificial Sequence: Synthetic oligonucleotide
  Description of Combined DNA/RNA Molecule: Synthetic oligonucleotide
uugacuuagagguucuucatt

SEQ ID NO: 944 - DNA, 21 bp, Artificial Sequence
  Description of Artificial Sequence: Synthetic oligonucleotide
  Description of Combined DNA/RNA Molecule: Synthetic oligonucleotide
agaggucuaaaguggaagatt

SEQ ID NO: 945 - DNA, 21 bp, Artificial Sequence
  Description of Artificial Sequence: Synthetic oligonucleotide
  Description of Combined DNA/RNA Molecule: Synthetic oligonucleotide
ucuuccacuuuagaccucutt

SEQ ID NO: 946 - DNA, 21 bp, Artificial Sequence
  Description of Artificial Sequence: Synthetic oligonucleotide
  Description of Combined DNA/RNA Molecule: Synthetic oligonucleotide
auaucuacccauuuuucugtt

SEQ ID NO: 947 - DNA, 21 bp, Artificial Sequence
  Description of Artificial Sequence: Synthetic oligonucleotide
  Description of Combined DNA/RNA Molecule: Synthetic oligonucleotide
cagaaaaauggguagauautt

SEQ ID NO: 948 - DNA, 21 bp, Artificial Sequence
  Description of Artificial Sequence: Synthetic oligonucleotide
  Description of Combined DNA/RNA Molecule: Synthetic oligonucleotide
uaagccugaagugaaucagtt

SEQ ID NO: 949 - DNA, 21 bp, Artificial Sequence
  Description of Artificial Sequence: Synthetic oligonucleotide
  Description of Combined DNA/RNA Molecule: Synthetic oligonucleotide
cugauucacuucaggcuuatt

SEQ ID NO: 950 - DNA, 21 bp, Artificial Sequence
  Description of Artificial Sequence: Synthetic oligonucleotide
  Description of Combined DNA/RNA Molecule: Synthetic oligonucleotide
agaugcagaccauuuaauutt

SEQ ID NO: 951 - DNA, 21 bp, Artificial Sequence
  Description of Artificial Sequence: Synthetic oligonucleotide
  Description of Combined DNA/RNA Molecule: Synthetic oligonucleotide
aauuaaauggucugcaucutt

SEQ ID NO: 952 - DNA, 21 bp, Artificial Sequence
  Description of Artificial Sequence: Synthetic oligonucleotide
  Description of Combined DNA/RNA Molecule: Synthetic oligonucleotide
aguguuguuuguccaauuctt

SEQ ID NO: 953 - DNA, 21 bp, Artificial Sequence
  Description of Artificial Sequence: Synthetic oligonucleotide
  Description of Combined DNA/RNA Molecule: Synthetic oligonucleotide
gaauuggacaaacaacacutt

SEQ ID NO: 954 - DNA, 21 bp, Artificial Sequence
  Description of Artificial Sequence: Synthetic oligonucleotide
  Description of Combined DNA/RNA Molecule: Synthetic oligonucleotide
cuauaaugaagagcuuuuutt

SEQ ID NO: 955 - DNA, 21 bp, Artificial Sequence
  Description of Artificial Sequence: Synthetic oligonucleotide
  Description of Combined DNA/RNA Molecule: Synthetic oligonucleotide
aaaaagcucuucauuauagtt

SEQ ID NO: 956 - DNA, 21 bp, Artificial Sequence
  Description of Artificial Sequence: Synthetic oligonucleotide
  Description of Combined DNA/RNA Molecule: Synthetic oligonucleotide
agaggagugauaauuaaagtt

SEQ ID NO: 957 - DNA, 21 bp, Artificial Sequence
  Description of Artificial Sequence: Synthetic oligonucleotide
  Description of Combined DNA/RNA Molecule: Synthetic oligonucleotide
cuuuaauuaucacuccucutt

SEQ ID NO: 958 - DNA, 21 bp, Artificial Sequence
  Description of Artificial Sequence: Synthetic oligonucleotide
  Description of Combined DNA/RNA Molecule: Synthetic oligonucleotide
uuucucuguuacaauacautt

SEQ ID NO: 959 - DNA, 21 bp, Artificial Sequence
  Description of Artificial Sequence: Synthetic oligonucleotide
  Description of Combined DNA/RNA Molecule: Synthetic oligonucleotide
auguauuguaacagagaaatt

SEQ ID NO: 960 - DNA, 21 bp, Artificial Sequence
  Description of Artificial Sequence: Synthetic oligonucleotide
  Description of Combined DNA/RNA Molecule: Synthetic oligonucleotide
aacaucuauaauugcaacatt

SEQ ID NO: 961 - DNA, 21 bp, Artificial Sequence
  Description of Artificial Sequence: Synthetic oligonucleotide
  Description of Combined DNA/RNA Molecule: Synthetic oligonucleotide
uguugcaauuauagauguutt

SEQ ID NO: 962 - DNA, 21 bp, Artificial Sequence
  Description of Artificial Sequence: Synthetic oligonucleotide
  Description of Combined DNA/RNA Molecule: Synthetic oligonucleotide
ugcuagaaguacauaagactt

SEQ ID NO: 963 - DNA, 21 bp, Artificial Sequence
  Description of Artificial Sequence: Synthetic oligonucleotide
  Description of Combined DNA/RNA Molecule: Synthetic oligonucleotide
gucuuauguacuucuagcatt

SEQ ID NO: 964 - DNA, 21 bp, Artificial Sequence
  Description of Artificial Sequence: Synthetic oligonucleotide
  Description of Combined DNA/RNA Molecule: Synthetic oligonucleotide
aauguacucaagacugauctt

SEQ ID NO: 965 - DNA, 21 bp, Artificial Sequence
  Description of Artificial Sequence: Synthetic oligonucleotide
  Description of Combined DNA/RNA Molecule: Synthetic oligonucleotide
gaucagucuugaguacauutt

SEQ ID NO: 966 - DNA, 21 bp, Artificial Sequence
  Description of Artificial Sequence: Synthetic oligonucleotide
  Description of Combined DNA/RNA Molecule: Synthetic oligonucleotide
guacucaagacugaucuuctt

SEQ ID NO: 967 - DNA, 21 bp, Artificial Sequence
  Description of Artificial Sequence: Synthetic oligonucleotide
  Description of Combined DNA/RNA Molecule: Synthetic oligonucleotide
gaagaucagucuugaguactt

SEQ ID NO: 968 - DNA, 21 bp, Artificial Sequence
  Description of Artificial Sequence: Synthetic oligonucleotide
  Description of Combined DNA/RNA Molecule: Synthetic oligonucleotide
cacucugauaaacucaaugtt

SEQ ID NO: 969 - DNA, 21 bp, Artificial Sequence
  Description of Artificial Sequence: Synthetic oligonucleotide
  Description of Combined DNA/RNA Molecule: Synthetic oligonucleotide
cauugaguuuaucagagugtt

SEQ ID NO: 970 - DNA, 21 bp, Artificial Sequence
  Description of Artificial Sequence: Synthetic oligonucleotide
  Description of Combined DNA/RNA Molecule: Synthetic oligonucleotide
aagagcagauuaccucugctt

SEQ ID NO: 971 - DNA, 21 bp, Artificial Sequence
  Description of Artificial Sequence: Synthetic oligonucleotide
  Description of Combined DNA/RNA Molecule: Synthetic oligonucleotide
gcagagguaaucugcucuutt

SEQ ID NO: 972 - DNA, 21 bp, Artificial Sequence
  Description of Artificial Sequence: Synthetic oligonucleotide
  Description of Combined DNA/RNA Molecule: Synthetic oligonucleotide
ucugcgagcccagaucaactt

SEQ ID NO: 973 - DNA, 21 bp, Artificial Sequence
  Description of Artificial Sequence: Synthetic oligonucleotide
  Description of Combined DNA/RNA Molecule: Synthetic oligonucleotide
guugaucugggcucgcagatt

SEQ ID NO: 974 - DNA, 21 bp, Artificial Sequence
  Description of Artificial Sequence: Synthetic oligonucleotide
  Description of Combined DNA/RNA Molecule: Synthetic oligonucleotide
aacuugagccuuguguauatt

SEQ ID NO: 975 - DNA, 21 bp, Artificial Sequence
  Description of Artificial Sequence: Synthetic oligonucleotide
  Description of Combined DNA/RNA Molecule: Synthetic oligonucleotide
uauacacaaggcucaaguutt

SEQ ID NO: 976 - DNA, 21 bp, Artificial Sequence
  Description of Artificial Sequence: Synthetic oligonucleotide
  Description of Combined DNA/RNA Molecule: Synthetic oligonucleotide
gaauauauauaucagccggtt

SEQ ID NO: 977 - DNA, 21 bp, Artificial Sequence
  Description of Artificial Sequence: Synthetic oligonucleotide
  Description of Combined DNA/RNA Molecule: Synthetic oligonucleotide
ccggcugauauauauauuctt

SEQ ID NO: 978 - DNA, 21 bp, Artificial Sequence
  Description of Artificial Sequence: Synthetic oligonucleotide
  Description of Combined DNA/RNA Molecule: Synthetic oligonucleotide
ugucaucccuauaguucactt

SEQ ID NO: 979 - DNA, 21 bp, Artificial Sequence
  Description of Artificial Sequence: Synthetic oligonucleotide
  Description of Combined DNA/RNA Molecule: Synthetic oligonucleotide
gugaacuauagggaugacatt

SEQ ID NO: 980 - DNA, 21 bp, Artificial Sequence
  Description of Artificial Sequence: Synthetic oligonucleotide
  Description of Combined DNA/RNA Molecule: Synthetic oligonucleotide
gaucuggcaaccauauuuctt

SEQ ID NO: 981 - DNA, 21 bp, Artificial Sequence
  Description of Artificial Sequence: Synthetic oligonucleotide
  Description of Combined DNA/RNA Molecule: Synthetic oligonucleotide
gaaauaugguugccagauctt

SEQ ID NO: 982 - DNA, 21 bp, Artificial Sequence
  Description of Artificial Sequence: Synthetic oligonucleotide
  Description of Combined DNA/RNA Molecule: Synthetic oligonucleotide
uggcaaccauauuucuggatt

SEQ ID NO: 983 - DNA, 21 bp, Artificial Sequence
  Description of Artificial Sequence: Synthetic oligonucleotide
  Description of Combined DNA/RNA Molecule: Synthetic oligonucleotide
uccagaaauaugguugccatt

SEQ ID NO: 984 - DNA, 21 bp, Artificial Sequence
  Description of Artificial Sequence: Synthetic oligonucleotide
  Description of Combined DNA/RNA Molecule: Synthetic oligonucleotide
gauguuuaccgaaguguugtt

SEQ ID NO: 985 - DNA, 21 bp, Artificial Sequence
  Description of Artificial Sequence: Synthetic oligonucleotide
  Description of Combined DNA/RNA Molecule: Synthetic oligonucleotide
caacacuucgguaaacauctt

SEQ ID NO: 986 - DNA, 21 bp, Artificial Sequence
  Description of Artificial Sequence: Synthetic oligonucleotide
  Description of Combined DNA/RNA Molecule: Synthetic oligonucleotide
uuccuuaucgagaaucuaatt

SEQ ID NO: 987 - DNA, 21 bp, Artificial Sequence
  Description of Artificial Sequence: Synthetic oligonucleotide
  Description of Combined DNA/RNA Molecule: Synthetic oligonucleotide
uuagauucucgauaaggaatt

SEQ ID NO: 988 - DNA, 21 bp, Artificial Sequence
  Description of Artificial Sequence: Synthetic oligonucleotide
  Description of Combined DNA/RNA Molecule: Synthetic oligonucleotide
agcuuaauugcuuucuggatt

SEQ ID NO: 989 - DNA, 21 bp, Artificial Sequence
  Description of Artificial Sequence: Synthetic oligonucleotide
  Description of Combined DNA/RNA Molecule: Synthetic oligonucleotide
uccagaaagcaauuaagcutt

SEQ ID NO: 990 - DNA, 21 bp, Artificial Sequence
  Description of Artificial Sequence: Synthetic oligonucleotide
  Description of Combined DNA/RNA Molecule: Synthetic oligonucleotide
uugcuauuaugggagaccatt

SEQ ID NO: 991 - DNA, 21 bp, Artificial Sequence
  Description of Artificial Sequence: Synthetic oligonucleotide
  Description of Combined DNA/RNA Molecule: Synthetic oligonucleotide
uggucucccauaauagcaatt

SEQ ID NO: 992 - DNA, 21 bp, Artificial Sequence
  Description of Artificial Sequence: Synthetic oligonucleotide
  Description of Combined DNA/RNA Molecule: Synthetic oligonucleotide
gucauggcgucgcagccaatt

SEQ ID NO: 993 - DNA, 21 bp, Artificial Sequence
  Description of Artificial Sequence: Synthetic oligonucleotide
  Description of Combined DNA/RNA Molecule: Synthetic oligonucleotide
uuggcugcgacgccaugactt

SEQ ID NO: 994 - DNA, 21 bp, Artificial Sequence
  Description of Artificial Sequence: Synthetic oligonucleotide
  Description of Combined DNA/RNA Molecule: Synthetic oligonucleotide
uaauugcacuaucuuugcgtt

SEQ ID NO: 995 - DNA, 21 bp, Artificial Sequence
  Description of Artificial Sequence: Synthetic oligonucleotide
  Description of Combined DNA/RNA Molecule: Synthetic oligonucleotide
cgcaaagauagugcaauuatt

SEQ ID NO: 996 - DNA, 21 bp, Artificial Sequence
  Description of Artificial Sequence: Synthetic oligonucleotide
  Description of Combined DNA/RNA Molecule: Synthetic oligonucleotide
cuaucuuugcguauggccatt

SEQ ID NO: 997 - DNA, 21 bp, Artificial Sequence
  Description of Artificial Sequence: Synthetic oligonucleotide
  Description of Combined DNA/RNA Molecule: Synthetic oligonucleotide
uggccauacgcaaagauagtt

SEQ ID NO: 998 - DNA, 21 bp, Artificial Sequence
  Description of Artificial Sequence: Synthetic oligonucleotide
  Description of Combined DNA/RNA Molecule: Synthetic oligonucleotide
ucccuauaguucacuuugutt

SEQ ID NO: 999 - DNA, 21 bp, Artificial Sequence
  Description of Artificial Sequence: Synthetic oligonucleotide
  Description of Combined DNA/RNA Molecule: Synthetic oligonucleotide
acaaagugaacuauagggatt

SEQ ID NO: 1000 - DNA, 21 bp, Artificial Sequence
  Description of Artificial Sequence: Synthetic oligonucleotide
  Description of Combined DNA/RNA Molecule: Synthetic oligonucleotide
ucaaccuuuaauucacuugtt

SEQ ID NO: 1001 - DNA, 21 bp, Artificial Sequence
  Description of Artificial Sequence: Synthetic oligonucleotide
  Description of Combined DNA/RNA Molecule: Synthetic oligonucleotide
caagugaauuaaagguugatt

SEQ ID NO: 1002 - DNA, 21 bp, Artificial Sequence
  Description of Artificial Sequence: Synthetic oligonucleotide
  Description of Combined DNA/RNA Molecule: Synthetic oligonucleotide
ggcaaccauauuucuggaatt

SEQ ID NO: 1003 - DNA, 21 bp, Artificial Sequence
  Description of Artificial Sequence: Synthetic oligonucleotide
  Description of Combined DNA/RNA Molecule: Synthetic oligonucleotide
uuccagaaauaugguugcctt

SEQ ID NO: 1004 - DNA, 21 bp, Artificial Sequence
  Description of Artificial Sequence: Synthetic oligonucleotide
  Description of Combined DNA/RNA Molecule: Synthetic oligonucleotide
auguacucaagacugaucutt

SEQ ID NO: 1005 - DNA, 21 bp, Artificial Sequence
  Description of Artificial Sequence: Synthetic oligonucleotide
  Description of Combined DNA/RNA Molecule: Synthetic oligonucleotide
agaucagucuugaguacautt

SEQ ID NO: 1006 - DNA, 21 bp, Artificial Sequence
  Description of Artificial Sequence: Synthetic oligonucleotide
  Description of Combined DNA/RNA Molecule: Synthetic oligonucleotide
gcagaccauuuaauuuggctt

SEQ ID NO: 1007 - DNA, 21 bp, Artificial Sequence
  Description of Artificial Sequence: Synthetic oligonucleotide
  Description of Combined DNA/RNA Molecule: Synthetic oligonucleotide
gccaaauuaaauggucugctt

SEQ ID NO: 1008 - DNA, 21 bp, Artificial Sequence
  Description of Artificial Sequence: Synthetic oligonucleotide
  Description of Combined DNA/RNA Molecule: Synthetic oligonucleotide
ucugagagacuacagaugutt

SEQ ID NO: 1009 - DNA, 21 bp, Artificial Sequence
  Description of Artificial Sequence: Synthetic oligonucleotide
  Description of Combined DNA/RNA Molecule: Synthetic oligonucleotide
acaucuguagucucucagatt

SEQ ID NO: 1010 - DNA, 21 bp, Artificial Sequence
  Description of Artificial Sequence: Synthetic oligonucleotide
  Description of Combined DNA/RNA Molecule: Synthetic oligonucleotide
ugcucauagagcaaagaactt

SEQ ID NO: 1011 - DNA, 21 bp, Artificial Sequence
  Description of Artificial Sequence: Synthetic oligonucleotide
  Description of Combined DNA/RNA Molecule: Synthetic oligonucleotide
guucuuugcucuaugagcatt

SEQ ID NO: 1012 - DNA, 21 bp, Artificial Sequence
  Description of Artificial Sequence: Synthetic oligonucleotide
  Description of Combined DNA/RNA Molecule: Synthetic oligonucleotide
acauaagaccuuauuuggutt

SEQ ID NO: 1013 - DNA, 21 bp, Artificial Sequence
  Description of Artificial Sequence: Synthetic oligonucleotide
  Description of Combined DNA/RNA Molecule: Synthetic oligonucleotide
accaaauaaggucuuaugutt

SEQ ID NO: 1014 - DNA, 21 bp, Artificial Sequence
  Description of Artificial Sequence: Synthetic oligonucleotide
  Description of Combined DNA/RNA Molecule: Synthetic oligonucleotide
uuugugcugauucugauggtt

SEQ ID NO: 1015 - DNA, 21 bp, Artificial Sequence
  Description of Artificial Sequence: Synthetic oligonucleotide
  Description of Combined DNA/RNA Molecule: Synthetic oligonucleotide
ccaucagaaucagcacaaatt

SEQ ID NO: 1016 - DNA, 21 bp, Artificial Sequence
  Description of Artificial Sequence: Synthetic oligonucleotide
  Description of Combined DNA/RNA Molecule: Synthetic oligonucleotide
ccaucaacacugguaagaatt

SEQ ID NO: 1017 - DNA, 21 bp, Artificial Sequence
  Description of Artificial Sequence: Synthetic oligonucleotide
  Description of Combined DNA/RNA Molecule: Synthetic oligonucleotide
uucuuaccaguguugauggtt

SEQ ID NO: 1018 - DNA, 21 bp, Artificial Sequence
  Description of Artificial Sequence: Synthetic oligonucleotide
  Description of Combined DNA/RNA Molecule: Synthetic oligonucleotide
agacaauuccggauguggatt

SEQ ID NO: 1019 - DNA, 21 bp, Artificial Sequence
  Description of Artificial Sequence: Synthetic oligonucleotide
  Description of Combined DNA/RNA Molecule: Synthetic oligonucleotide
uccacauccggaauugucutt

SEQ ID NO: 1020 - DNA, 21 bp, Artificial Sequence
  Description of Artificial Sequence: Synthetic oligonucleotide
  Description of Combined DNA/RNA Molecule: Synthetic oligonucleotide
gaacuugagccuuguguautt

SEQ ID NO: 1021 - DNA, 21 bp, Artificial Sequence
  Description of Artificial Sequence: Synthetic oligonucleotide
  Description of Combined DNA/RNA Molecule: Synthetic oligonucleotide
auacacaaggcucaaguuctt

SEQ ID NO: 1022 - DNA, 21 bp, Artificial Sequence
  Description of Artificial Sequence: Synthetic oligonucleotide
  Description of Combined DNA/RNA Molecule: Synthetic oligonucleotide
uaauuuggcagagcggaaatt

SEQ ID NO: 1023 - DNA, 21 bp, Artificial Sequence
  Description of Artificial Sequence: Synthetic oligonucleotide
  Description of Combined DNA/RNA Molecule: Synthetic oligonucleotide
uuuccgcucugccaaauuatt

SEQ ID NO: 1024 - DNA, 21 bp, Artificial Sequence
  Description of Artificial Sequence: Synthetic oligonucleotide
  Description of Combined DNA/RNA Molecule: Synthetic oligonucleotide
uggaugaaguuauuaugggtt

SEQ ID NO: 1025 - DNA, 21 bp, Artificial Sequence
  Description of Artificial Sequence: Synthetic oligonucleotide
  Description of Combined DNA/RNA Molecule: Synthetic oligonucleotide
cccauaauaacuucauccatt

SEQ ID NO: 1026 - DNA, 21 bp, Artificial Sequence
  Description of Artificial Sequence: Synthetic oligonucleotide
  Description of Combined DNA/RNA Molecule: Synthetic oligonucleotide
aucuacaugaacuacaagatt

SEQ ID NO: 1027 - DNA, 21 bp, Artificial Sequence
  Description of Artificial Sequence: Synthetic oligonucleotide
  Description of Combined DNA/RNA Molecule: Synthetic oligonucleotide
ucuuguaguucauguagautt

SEQ ID NO: 1028 - DNA, 21 bp, Artificial Sequence
  Description of Artificial Sequence: Synthetic oligonucleotide
  Description of Combined DNA/RNA Molecule: Synthetic oligonucleotide
gguauuuuugaucuggcaatt

SEQ ID NO: 1029 - DNA, 21 bp, Artificial Sequence
  Description of Artificial Sequence: Synthetic oligonucleotide
  Description of Combined DNA/RNA Molecule: Synthetic oligonucleotide
uugccagaucaaaaauacctt

SEQ ID NO: 1030 - DNA, 21 bp, Artificial Sequence
  Description of Artificial Sequence: Synthetic oligonucleotide
  Description of Combined DNA/RNA Molecule: Synthetic oligonucleotide
cuaaugaagaguauaccugtt

SEQ ID NO: 1031 - DNA, 21 bp, Artificial Sequence
  Description of Artificial Sequence: Synthetic oligonucleotide
  Description of Combined DNA/RNA Molecule: Synthetic oligonucleotide
cagguauacucuucauuagtt

SEQ ID NO: 1032 - DNA, 21 bp, Artificial Sequence
  Description of Artificial Sequence: Synthetic oligonucleotide
  Description of Combined DNA/RNA Molecule: Synthetic oligonucleotide
uuugagaaacuuacugauatt

SEQ ID NO: 1033 - DNA, 21 bp, Artificial Sequence
  Description of Artificial Sequence: Synthetic oligonucleotide
  Description of Combined DNA/RNA Molecule: Synthetic oligonucleotide
uaucaguaaguuucucaaatt

SEQ ID NO: 1034 - DNA, 21 bp, Artificial Sequence
  Description of Artificial Sequence: Synthetic oligonucleotide
  Description of Combined DNA/RNA Molecule: Synthetic oligonucleotide
cgauaagauagaagaucaatt

SEQ ID NO: 1035 - DNA, 21 bp, Artificial Sequence
  Description of Artificial Sequence: Synthetic oligonucleotide
  Description of Combined DNA/RNA Molecule: Synthetic oligonucleotide
uugaucuucuaucuuaucgtt

SEQ ID NO: 1036 - DNA, 21 bp, Artificial Sequence
  Description of Artificial Sequence: Synthetic oligonucleotide
  Description of Combined DNA/RNA Molecule: Synthetic oligonucleotide
cuggcaaccauauuucuggtt

SEQ ID NO: 1037 - DNA, 21 bp, Artificial Sequence
  Description of Artificial Sequence: Synthetic oligonucleotide
  Description of Combined DNA/RNA Molecule: Synthetic oligonucleotide
ccagaaauaugguugccagtt

SEQ ID NO: 1038 - DNA, 21 bp, Artificial Sequence
  Description of Artificial Sequence: Synthetic oligonucleotide
  Description of Combined DNA/RNA Molecule: Synthetic oligonucleotide
uagauaccauuacuacagutt

SEQ ID NO: 1039 - DNA, 21 bp, Artificial Sequence
  Description of Artificial Sequence: Synthetic oligonucleotide
  Description of Combined DNA/RNA Molecule: Synthetic oligonucleotide
acuguaguaaugguaucuatt

SEQ ID NO: 1040 - DNA, 21 bp, Artificial Sequence
  Description of Artificial Sequence: Synthetic oligonucleotide
  Description of Combined DNA/RNA Molecule: Synthetic oligonucleotide
guauuaaauuggguuucautt

SEQ ID NO: 1041 - DNA, 21 bp, Artificial Sequence
  Description of Artificial Sequence: Synthetic oligonucleotide
  Description of Combined DNA/RNA Molecule: Synthetic oligonucleotide
augaaacccaauuuaauactt

SEQ ID NO: 1042 - DNA, 21 bp, Artificial Sequence
  Description of Artificial Sequence: Synthetic oligonucleotide
  Description of Combined DNA/RNA Molecule: Synthetic oligonucleotide
aagaccuuauuugguaauctt

SEQ ID NO: 1043 - DNA, 21 bp, Artificial Sequence
  Description of Artificial Sequence: Synthetic oligonucleotide
  Description of Combined DNA/RNA Molecule: Synthetic oligonucleotide
gauuaccaaauaaggucuutt

SEQ ID NO: 1044 - DNA, 21 bp, Artificial Sequence
  Description of Artificial Sequence: Synthetic oligonucleotide
  Description of Combined DNA/RNA Molecule: Synthetic oligonucleotide
gcuguugauaagagagcuctt

SEQ ID NO: 1045 - DNA, 21 bp, Artificial Sequence
  Description of Artificial Sequence: Synthetic oligonucleotide
  Description of Combined DNA/RNA Molecule: Synthetic oligonucleotide
gagcucucuuaucaacagctt

SEQ ID NO: 1046 - DNA, 21 bp, Artificial Sequence
  Description of Artificial Sequence: Synthetic oligonucleotide
  Description of Combined DNA/RNA Molecule: Synthetic oligonucleotide
uacucauguuucucagauutt

SEQ ID NO: 1047 - DNA, 21 bp, Artificial Sequence
  Description of Artificial Sequence: Synthetic oligonucleotide
  Description of Combined DNA/RNA Molecule: Synthetic oligonucleotide
aaucugagaaacaugaguatt

SEQ ID NO: 1048 - DNA, 21 bp, Artificial Sequence
  Description of Artificial Sequence: Synthetic oligonucleotide
  Description of Combined DNA/RNA Molecule: Synthetic oligonucleotide
cagauggacguaaggcagctt

SEQ ID NO: 1049 - DNA, 21 bp, Artificial Sequence
  Description of Artificial Sequence: Synthetic oligonucleotide
  Description of Combined DNA/RNA Molecule: Synthetic oligonucleotide
gcugccuuacguccaucugtt

SEQ ID NO: 1050 - DNA, 21 bp, Artificial Sequence
  Description of Artificial Sequence: Synthetic oligonucleotide
  Description of Combined DNA/RNA Molecule: Synthetic oligonucleotide
uaucccaacagguacgacatt

SEQ ID NO: 1051 - DNA, 21 bp, Artificial Sequence
  Description of Artificial Sequence: Synthetic oligonucleotide
  Description of Combined DNA/RNA Molecule: Synthetic oligonucleotide
ugucguaccuguugggauatt

SEQ ID NO: 1052 - DNA, 21 bp, Artificial Sequence
  Description of Artificial Sequence: Synthetic oligonucleotide
  Description of Combined DNA/RNA Molecule: Synthetic oligonucleotide
cauugcuauuaugggagactt

SEQ ID NO: 1053 - DNA, 21 bp, Artificial Sequence
  Description of Artificial Sequence: Synthetic oligonucleotide
  Description of Combined DNA/RNA Molecule: Synthetic oligonucleotide
gucucccauaauagcaaugtt

SEQ ID NO: 1054 - DNA, 21 bp, Artificial Sequence
  Description of Artificial Sequence: Synthetic oligonucleotide
  Description of Combined DNA/RNA Molecule: Synthetic oligonucleotide
cccucaguaaauccauggutt

SEQ ID NO: 1055 - DNA, 21 bp, Artificial Sequence
  Description of Artificial Sequence: Synthetic oligonucleotide
  Description of Combined DNA/RNA Molecule: Synthetic oligonucleotide
accauggauuuacugagggtt

SEQ ID NO: 1056 - DNA, 21 bp, Artificial Sequence
  Description of Artificial Sequence: Synthetic oligonucleotide
  Description of Combined DNA/RNA Molecule: Synthetic oligonucleotide
ggucauuacugcccuuguatt

SEQ ID NO: 1057 - DNA, 21 bp, Artificial Sequence
  Description of Artificial Sequence: Synthetic oligonucleotide
  Description of Combined DNA/RNA Molecule: Synthetic oligonucleotide
uacaagggcaguaaugacctt

SEQ ID NO: 1058 - DNA, 21 bp, Artificial Sequence
  Description of Artificial Sequence: Synthetic oligonucleotide
  Description of Combined DNA/RNA Molecule: Synthetic oligonucleotide
aaccacucaaaaacauuugtt

SEQ ID NO: 1059 - DNA, 21 bp, Artificial Sequence
  Description of Artificial Sequence: Synthetic oligonucleotide
  Description of Combined DNA/RNA Molecule: Synthetic oligonucleotide
caaauguuuuugagugguutt

SEQ ID NO: 1060 - DNA, 21 bp, Artificial Sequence
  Description of Artificial Sequence: Synthetic oligonucleotide
  Description of Combined DNA/RNA Molecule: Synthetic oligonucleotide
uuugcaaguuaaugaaucutt

SEQ ID NO: 1061 - DNA, 21 bp, Artificial Sequence
  Description of Artificial Sequence: Synthetic oligonucleotide
  Description of Combined DNA/RNA Molecule: Synthetic oligonucleotide
agauucauuaacuugcaaatt

SEQ ID NO: 1062 - DNA, 21 bp, Artificial Sequence
  Description of Artificial Sequence: Synthetic oligonucleotide
  Description of Combined DNA/RNA Molecule: Synthetic oligonucleotide
uuauuuucaguagucagaatt

SEQ ID NO: 1063 - DNA, 21 bp, Artificial Sequence
  Description of Artificial Sequence: Synthetic oligonucleotide
  Description of Combined DNA/RNA Molecule: Synthetic oligonucleotide
uucugacuacugaaaauaatt

SEQ ID NO: 1064 - DNA, 21 bp, Artificial Sequence
  Description of Artificial Sequence: Synthetic oligonucleotide
  Description of Combined DNA/RNA Molecule: Synthetic oligonucleotide
uuuucucgauucaaaucuutt

SEQ ID NO: 1065 - DNA, 21 bp, Artificial Sequence
  Description of Artificial Sequence: Synthetic oligonucleotide
  Description of Combined DNA/RNA Molecule: Synthetic oligonucleotide
aagauuugaaucgagaaaatt

SEQ ID NO: 1066 - DNA, 21 bp, Artificial Sequence
  Description of Artificial Sequence: Synthetic oligonucleotide
  Description of Combined DNA/RNA Molecule: Synthetic oligonucleotide
guacgaaaagaaguuagugtt

SEQ ID NO: 1067 - DNA, 21 bp, Artificial Sequence
  Description of Artificial Sequence: Synthetic oligonucleotide
  Description of Combined DNA/RNA Molecule: Synthetic oligonucleotide
cacuaacuucuuuucguactt

SEQ ID NO: 1068 - DNA, 21 bp, Artificial Sequence
  Description of Artificial Sequence: Synthetic oligonucleotide
  Description of Combined DNA/RNA Molecule: Synthetic oligonucleotide
uuuaaaacgagaucuugcutt

SEQ ID NO: 1069 - DNA, 21 bp, Artificial Sequence
  Description of Artificial Sequence: Synthetic oligonucleotide
  Description of Combined DNA/RNA Molecule: Synthetic oligonucleotide
agcaagaucucguuuuaaatt

SEQ ID NO: 1070 - DNA, 21 bp, Artificial Sequence
  Description of Artificial Sequence: Synthetic oligonucleotide
  Description of Combined DNA/RNA Molecule: Synthetic oligonucleotide
gaauugauuaauguacucatt

SEQ ID NO: 1071 - DNA, 21 bp, Artificial Sequence
  Description of Artificial Sequence: Synthetic oligonucleotide
  Description of Combined DNA/RNA Molecule: Synthetic oligonucleotide
ugaguacauuaaucaauuctt

SEQ ID NO: 1072 - DNA, 21 bp, Artificial Sequence
  Description of Artificial Sequence: Synthetic oligonucleotide
  Description of Combined DNA/RNA Molecule: Synthetic oligonucleotide
gauggacguaaggcagcuctt

SEQ ID NO: 1073 - DNA, 21 bp, Artificial Sequence
  Description of Artificial Sequence: Synthetic oligonucleotide
  Description of Combined DNA/RNA Molecule: Synthetic oligonucleotide
gagcugccuuacguccauctt

SEQ ID NO: 1074 - DNA, 21 bp, Artificial Sequence
  Description of Artificial Sequence: Synthetic oligonucleotide
  Description of Combined DNA/RNA Molecule: Synthetic oligonucleotide
caucugacuaauggcucugtt

SEQ ID NO: 1075 - DNA, 21 bp, Artificial Sequence
  Description of Artificial Sequence: Synthetic oligonucleotide
  Description of Combined DNA/RNA Molecule: Synthetic oligonucleotide
cagagccauuagucagaugtt

SEQ ID NO: 1076 - DNA, 21 bp, Artificial Sequence
  Description of Artificial Sequence: Synthetic oligonucleotide
  Description of Combined DNA/RNA Molecule: Synthetic oligonucleotide
gugauccuguacgaaaagatt

SEQ ID NO: 1077 - DNA, 21 bp, Artificial Sequence
  Description of Artificial Sequence: Synthetic oligonucleotide
  Description of Combined DNA/RNA Molecule: Synthetic oligonucleotide
ucuuuucguacaggaucactt

SEQ ID NO: 1078 - DNA, 21 bp, Artificial Sequence
  Description of Artificial Sequence: Synthetic oligonucleotide
  Description of Combined DNA/RNA Molecule: Synthetic oligonucleotide
agcucuuauuaaggaguautt

SEQ ID NO: 1079 - DNA, 21 bp, Artificial Sequence
  Description of Artificial Sequence: Synthetic oligonucleotide
  Description of Combined DNA/RNA Molecule: Synthetic oligonucleotide
auacuccuuaauaagagcutt

SEQ ID NO: 1080 - DNA, 21 bp, Artificial Sequence
  Description of Artificial Sequence: Synthetic oligonucleotide
  Description of Combined DNA/RNA Molecule: Synthetic oligonucleotide
gcucuuauuaaggaguauatt

SEQ ID NO: 1081 - DNA, 21 bp, Artificial Sequence
  Description of Artificial Sequence: Synthetic oligonucleotide
  Description of Combined DNA/RNA Molecule: Synthetic oligonucleotide
uauacuccuuaauaagagctt

SEQ ID NO: 1082 - DNA, 21 bp, Artificial Sequence
  Description of Artificial Sequence: Synthetic oligonucleotide
  Description of Combined DNA/RNA Molecule: Synthetic oligonucleotide
ucuuauuaaggaguauacgtt

SEQ ID NO: 1083 - DNA, 21 bp, Artificial Sequence
  Description of Artificial Sequence: Synthetic oligonucleotide
  Description of Combined DNA/RNA Molecule: Synthetic oligonucleotide
cguauacuccuuaauaagatt

SEQ ID NO: 1084 - DNA, 21 bp, Artificial Sequence
  Description of Artificial Sequence: Synthetic oligonucleotide
  Description of Combined DNA/RNA Molecule: Synthetic oligonucleotide
uauuaaggaguauacggagtt

SEQ ID NO: 1085 - DNA, 21 bp, Artificial Sequence
  Description of Artificial Sequence: Synthetic oligonucleotide
  Description of Combined DNA/RNA Molecule: Synthetic oligonucleotide
cuccguauacuccuuaauatt

SEQ ID NO: 1086 - DNA, 21 bp, Artificial Sequence
  Description of Artificial Sequence: Synthetic oligonucleotide
  Description of Combined DNA/RNA Molecule: Synthetic oligonucleotide
cugcagcccgugagaaaaatt

SEQ ID NO: 1087 - DNA, 21 bp, Artificial Sequence
  Description of Artificial Sequence: Synthetic oligonucleotide
  Description of Combined DNA/RNA Molecule: Synthetic oligonucleotide
uuuuucucacgggcugcagtt

SEQ ID NO: 1088 - DNA, 21 bp, Artificial Sequence
  Description of Artificial Sequence: Synthetic oligonucleotide
  Description of Combined DNA/RNA Molecule: Synthetic oligonucleotide
ucaagacugaucuucuaagtt

SEQ ID NO: 1089 - DNA, 21 bp, Artificial Sequence
  Description of Artificial Sequence: Synthetic oligonucleotide
  Description of Combined DNA/RNA Molecule: Synthetic oligonucleotide
cuuagaagaucagucuugatt

SEQ ID NO: 1090 - DNA, 21 bp, Artificial Sequence
  Description of Artificial Sequence: Synthetic oligonucleotide
  Description of Combined DNA/RNA Molecule: Synthetic oligonucleotide
cuucuaaguucacuggaaatt

SEQ ID NO: 1091 - DNA, 21 bp, Artificial Sequence
  Description of Artificial Sequence: Synthetic oligonucleotide
  Description of Combined DNA/RNA Molecule: Synthetic oligonucleotide
uuuccagugaacuuagaagtt

SEQ ID NO: 1092 - DNA, 21 bp, Artificial Sequence
  Description of Artificial Sequence: Synthetic oligonucleotide
  Description of Combined DNA/RNA Molecule: Synthetic oligonucleotide
ugcaaguuaaugaaucuuutt

SEQ ID NO: 1093 - DNA, 21 bp, Artificial Sequence
  Description of Artificial Sequence: Synthetic oligonucleotide
  Description of Combined DNA/RNA Molecule: Synthetic oligonucleotide
aaagauucauuaacuugcatt

SEQ ID NO: 1094 - DNA, 21 bp, Artificial Sequence
  Description of Artificial Sequence: Synthetic oligonucleotide
  Description of Combined DNA/RNA Molecule: Synthetic oligonucleotide
aaucuaaggauauagucaatt

SEQ ID NO: 1095 - DNA, 21 bp, Artificial Sequence
  Description of Artificial Sequence: Synthetic oligonucleotide
  Description of Combined DNA/RNA Molecule: Synthetic oligonucleotide
uugacuauauccuuagauutt

SEQ ID NO: 1096 - DNA, 21 bp, Artificial Sequence
  Description of Artificial Sequence: Synthetic oligonucleotide
  Description of Combined DNA/RNA Molecule: Synthetic oligonucleotide
aucucugaacacaagaacatt

SEQ ID NO: 1097 - DNA, 21 bp, Artificial Sequence
  Description of Artificial Sequence: Synthetic oligonucleotide
  Description of Combined DNA/RNA Molecule: Synthetic oligonucleotide
uguucuuguguucagagautt

SEQ ID NO: 1098 - DNA, 21 bp, Artificial Sequence
  Description of Artificial Sequence: Synthetic oligonucleotide
  Description of Combined DNA/RNA Molecule: Synthetic oligonucleotide
uucugaacaguggguaucutt

SEQ ID NO: 1099 - DNA, 21 bp, Artificial Sequence
  Description of Artificial Sequence: Synthetic oligonucleotide
  Description of Combined DNA/RNA Molecule: Synthetic oligonucleotide
agauacccacuguucagaatt

SEQ ID NO: 1100 - DNA, 21 bp, Artificial Sequence
  Description of Artificial Sequence: Synthetic oligonucleotide
  Description of Combined DNA/RNA Molecule: Synthetic oligonucleotide
aguuauuuauacccaucaatt

SEQ ID NO: 1101 - DNA, 21 bp, Artificial Sequence
  Description of Artificial Sequence: Synthetic oligonucleotide
  Description of Combined DNA/RNA Molecule: Synthetic oligonucleotide
uugauggguauaaauaacutt

SEQ ID NO: 1102 - DNA, 21 bp, Artificial Sequence
  Description of Artificial Sequence: Synthetic oligonucleotide
  Description of Combined DNA/RNA Molecule: Synthetic oligonucleotide
augcuaaacuguucagaaatt

SEQ ID NO: 1103 - DNA, 21 bp, Artificial Sequence
  Description of Artificial Sequence: Synthetic oligonucleotide
  Description of Combined DNA/RNA Molecule: Synthetic oligonucleotide
uuucugaacaguuuagcautt

SEQ ID NO: 1104 - DNA, 21 bp, Artificial Sequence
  Description of Artificial Sequence: Synthetic oligonucleotide
  Description of Combined DNA/RNA Molecule: Synthetic oligonucleotide
cuacagagcacuugguuactt

SEQ ID NO: 1105 - DNA, 21 bp, Artificial Sequence
  Description of Artificial Sequence: Synthetic oligonucleotide
  Description of Combined DNA/RNA Molecule: Synthetic oligonucleotide
guaaccaagugcucuguagtt

SEQ ID NO: 1106 - DNA, 21 bp, Artificial Sequence
  Description of Artificial Sequence: Synthetic oligonucleotide
  Description of Combined DNA/RNA Molecule: Synthetic oligonucleotide
uauauaucagccgggcgcgtt

SEQ ID NO: 1107 - DNA, 21 bp, Artificial Sequence
  Description of Artificial Sequence: Synthetic oligonucleotide
  Description of Combined DNA/RNA Molecule: Synthetic oligonucleotide
cgcgcccggcugauauauatt

SEQ ID NO: 1108 - DNA, 21 bp, Artificial Sequence
  Description of Artificial Sequence: Synthetic oligonucleotide
  Description of Combined DNA/RNA Molecule: Synthetic oligonucleotide
auguaaauacguauuucuatt

SEQ ID NO: 1109 - DNA, 21 bp, Artificial Sequence
  Description of Artificial Sequence: Synthetic oligonucleotide
  Description of Combined DNA/RNA Molecule: Synthetic oligonucleotide
uagaaauacguauuuacautt

SEQ ID NO: 1110 - DNA, 21 bp, Artificial Sequence
  Description of Artificial Sequence: Synthetic oligonucleotide
  Description of Combined DNA/RNA Molecule: Synthetic oligonucleotide
uuuuucucgauucaaaucutt

SEQ ID NO: 1111 - DNA, 21 bp, Artificial Sequence
  Description of Artificial Sequence: Synthetic oligonucleotide
  Description of Combined DNA/RNA Molecule: Synthetic oligonucleotide
agauuugaaucgagaaaaatt

SEQ ID NO: 1112 - DNA, 21 bp, Artificial Sequence
  Description of Artificial Sequence: Synthetic oligonucleotide
  Description of Combined DNA/RNA Molecule: Synthetic oligonucleotide
aaucuuaacccuuaggacutt

SEQ ID NO: 1113 - DNA, 21 bp, Artificial Sequence
  Description of Artificial Sequence: Synthetic oligonucleotide
  Description of Combined DNA/RNA Molecule: Synthetic oligonucleotide
aguccuaaggguuaagauutt

SEQ ID NO: 1114 - DNA, 21 bp, Artificial Sequence
  Description of Artificial Sequence: Synthetic oligonucleotide
  Description of Combined DNA/RNA Molecule: Synthetic oligonucleotide
ccuuaggacucugguauuutt

SEQ ID NO: 1115 - DNA, 21 bp, Artificial Sequence
  Description of Artificial Sequence: Synthetic oligonucleotide
  Description of Combined DNA/RNA Molecule: Synthetic oligonucleotide
aaauaccagaguccuaaggtt

SEQ ID NO: 1116 - DNA, 21 bp, Artificial Sequence
  Description of Artificial Sequence: Synthetic oligonucleotide
  Description of Combined DNA/RNA Molecule: Synthetic oligonucleotide
aauaaacugcccucaguaatt

SEQ ID NO: 1117 - DNA, 21 bp, Artificial Sequence
  Description of Artificial Sequence: Synthetic oligonucleotide
  Description of Combined DNA/RNA Molecule: Synthetic oligonucleotide
uuacugagggcaguuuauutt

SEQ ID NO: 1118 - DNA, 21 bp, Artificial Sequence
  Description of Artificial Sequence: Synthetic oligonucleotide
  Description of Combined DNA/RNA Molecule: Synthetic oligonucleotide
gauccuguacgaaaagaagtt

SEQ ID NO: 1119 - DNA, 21 bp, Artificial Sequence
  Description of Artificial Sequence: Synthetic oligonucleotide
  Description of Combined DNA/RNA Molecule: Synthetic oligonucleotide
cuucuuuucguacaggauctt

SEQ ID NO: 1120 - DNA, 21 bp, Artificial Sequence
  Description of Artificial Sequence: Synthetic oligonucleotide
  Description of Combined DNA/RNA Molecule: Synthetic oligonucleotide
aaugugauccuguacgaaatt

SEQ ID NO: 1121 - DNA, 21 bp, Artificial Sequence
  Description of Artificial Sequence: Synthetic oligonucleotide
  Description of Combined DNA/RNA Molecule: Synthetic oligonucleotide
uuucguacaggaucacauutt

SEQ ID NO: 1122 - DNA, 21 bp, Artificial Sequence
  Description of Artificial Sequence: Synthetic oligonucleotide
  Description of Combined DNA/RNA Molecule: Synthetic oligonucleotide
gugaaaacauuggccguuctt

SEQ ID NO: 1123 - DNA, 21 bp, Artificial Sequence
  Description of Artificial Sequence: Synthetic oligonucleotide
  Description of Combined DNA/RNA Molecule: Synthetic oligonucleotide
gaacggccaauguuuucactt

SEQ ID NO: 1124 - DNA, 21 bp, Artificial Sequence
  Description of Artificial Sequence: Synthetic oligonucleotide
  Description of Combined DNA/RNA Molecule: Synthetic oligonucleotide
cuugaggaaacucugaguatt

SEQ ID NO: 1125 - DNA, 21 bp, Artificial Sequence
  Description of Artificial Sequence: Synthetic oligonucleotide
  Description of Combined DNA/RNA Molecule: Synthetic oligonucleotide
uacucagaguuuccucaagtt

SEQ ID NO: 1126 - DNA, 21 bp, Artificial Sequence
  Description of Artificial Sequence: Synthetic oligonucleotide
  Description of Combined DNA/RNA Molecule: Synthetic oligonucleotide
cguuuaaaacgagaucuugtt

SEQ ID NO: 1127 - DNA, 21 bp, Artificial Sequence
  Description of Artificial Sequence: Synthetic oligonucleotide
  Description of Combined DNA/RNA Molecule: Synthetic oligonucleotide
caagaucucguuuuaaacgtt

SEQ ID NO: 1128 - DNA, 21 bp, Artificial Sequence
  Description of Artificial Sequence: Synthetic oligonucleotide
  Description of Combined DNA/RNA Molecule: Synthetic oligonucleotide
uuaaaacgagaucuugcugtt

SEQ ID NO: 1129 - DNA, 21 bp, Artificial Sequence
  Description of Artificial Sequence: Synthetic oligonucleotide
  Description of Combined DNA/RNA Molecule: Synthetic oligonucleotide
cagcaagaucucguuuuaatt

SEQ ID NO: 1130 - DNA, 21 bp, Artificial Sequence
  Description of Artificial Sequence: Synthetic oligonucleotide
  Description of Combined DNA/RNA Molecule: Synthetic oligonucleotide
aaagauguaucuggucucctt

SEQ ID NO: 1131 - DNA, 21 bp, Artificial Sequence
  Description of Artificial Sequence: Synthetic oligonucleotide
  Description of Combined DNA/RNA Molecule: Synthetic oligonucleotide
ggagaccagauacaucuuutt

SEQ ID NO: 1132 - DNA, 21 bp, Artificial Sequence
  Description of Artificial Sequence: Synthetic oligonucleotide
  Description of Combined DNA/RNA Molecule: Synthetic oligonucleotide
cagaaaaugugucuacucatt

SEQ ID NO: 1133 - DNA, 21 bp, Artificial Sequence
  Description of Artificial Sequence: Synthetic oligonucleotide
  Description of Combined DNA/RNA Molecule: Synthetic oligonucleotide
ugaguagacacauuuucugtt

SEQ ID NO: 1134 - DNA, 21 bp, Artificial Sequence
  Description of Artificial Sequence: Synthetic oligonucleotide
  Description of Combined DNA/RNA Molecule: Synthetic oligonucleotide
caggaauugauuaauguactt

SEQ ID NO: 1135 - DNA, 21 bp, Artificial Sequence
  Description of Artificial Sequence: Synthetic oligonucleotide
  Description of Combined DNA/RNA Molecule: Synthetic oligonucleotide
guacauuaaucaauuccugtt

SEQ ID NO: 1136 - DNA, 21 bp, Artificial Sequence
  Description of Artificial Sequence: Synthetic oligonucleotide
  Description of Combined DNA/RNA Molecule: Synthetic oligonucleotide
agucaacuaaagcauauuutt

SEQ ID NO: 1137 - DNA, 21 bp, Artificial Sequence
  Description of Artificial Sequence: Synthetic oligonucleotide
  Description of Combined DNA/RNA Molecule: Synthetic oligonucleotide
aaauaugcuuuaguugacutt

SEQ ID NO: 1138 - DNA, 21 bp, Artificial Sequence
  Description of Artificial Sequence: Synthetic oligonucleotide
  Description of Combined DNA/RNA Molecule: Synthetic oligonucleotide
uguguaacaaucuacaugatt

SEQ ID NO: 1139 - DNA, 21 bp, Artificial Sequence
  Description of Artificial Sequence: Synthetic oligonucleotide
  Description of Combined DNA/RNA Molecule: Synthetic oligonucleotide
ucauguagauuguuacacatt

SEQ ID NO: 1140 - DNA, 21 bp, Artificial Sequence
  Description of Artificial Sequence: Synthetic oligonucleotide
  Description of Combined DNA/RNA Molecule: Synthetic oligonucleotide
auaccauuuguuccuuggutt

SEQ ID NO: 1141 - DNA, 21 bp, Artificial Sequence
  Description of Artificial Sequence: Synthetic oligonucleotide
  Description of Combined DNA/RNA Molecule: Synthetic oligonucleotide
accaaggaacaaaugguautt

SEQ ID NO: 1142 - DNA, 21 bp, Artificial Sequence
  Description of Artificial Sequence: Synthetic oligonucleotide
  Description of Combined DNA/RNA Molecule: Synthetic oligonucleotide
gcagaaaucuaaggauauatt

SEQ ID NO: 1143 - DNA, 21 bp, Artificial Sequence
  Description of Artificial Sequence: Synthetic oligonucleotide
  Description of Combined DNA/RNA Molecule: Synthetic oligonucleotide
uauauccuuagauuucugctt

SEQ ID NO: 1144 - DNA, 21 bp, Artificial Sequence
  Description of Artificial Sequence: Synthetic oligonucleotide
  Description of Combined DNA/RNA Molecule: Synthetic oligonucleotide
uggcuucucacaggaacuctt

SEQ ID NO: 1145 - DNA, 21 bp, Artificial Sequence
  Description of Artificial Sequence: Synthetic oligonucleotide
  Description of Combined DNA/RNA Molecule: Synthetic oligonucleotide
gaguuccugugagaagccatt

SEQ ID NO: 1146 - DNA, 21 bp, Artificial Sequence
  Description of Artificial Sequence: Synthetic oligonucleotide
  Description of Combined DNA/RNA Molecule: Synthetic oligonucleotide
gagaugugaaucucugaactt

SEQ ID NO: 1147 - DNA, 21 bp, Artificial Sequence
  Description of Artificial Sequence: Synthetic oligonucleotide
  Description of Combined DNA/RNA Molecule: Synthetic oligonucleotide
guucagagauucacaucuctt

SEQ ID NO: 1148 - DNA, 21 bp, Artificial Sequence
  Description of Artificial Sequence: Synthetic oligonucleotide
  Description of Combined DNA/RNA Molecule: Synthetic oligonucleotide
uguaagccaauguugugagtt

SEQ ID NO: 1149 - DNA, 21 bp, Artificial Sequence
  Description of Artificial Sequence: Synthetic oligonucleotide
  Description of Combined DNA/RNA Molecule: Synthetic oligonucleotide
cucacaacauuggcuuacatt

SEQ ID NO: 1150 - DNA, 21 bp, Artificial Sequence
  Description of Artificial Sequence: Synthetic oligonucleotide
  Description of Combined DNA/RNA Molecule: Synthetic oligonucleotide
agccaauguugugaggcuutt

SEQ ID NO: 1151 - DNA, 21 bp, Artificial Sequence
  Description of Artificial Sequence: Synthetic oligonucleotide
  Description of Combined DNA/RNA Molecule: Synthetic oligonucleotide
aagccucacaacauuggcutt

SEQ ID NO: 1152 - DNA, 21 bp, Artificial Sequence
  Description of Artificial Sequence: Synthetic oligonucleotide
  Description of Combined DNA/RNA Molecule: Synthetic oligonucleotide
uugugaggcuucaaguucatt

SEQ ID NO: 1153 - DNA, 21 bp, Artificial Sequence
  Description of Artificial Sequence: Synthetic oligonucleotide
  Description of Combined DNA/RNA Molecule: Synthetic oligonucleotide
ugaacuugaagccucacaatt

SEQ ID NO: 1154 - DNA, 21 bp, Artificial Sequence
  Description of Artificial Sequence: Synthetic oligonucleotide
  Description of Combined DNA/RNA Molecule: Synthetic oligonucleotide
aggcagcucaugagaaacatt

SEQ ID NO: 1155 - DNA, 21 bp, Artificial Sequence
  Description of Artificial Sequence: Synthetic oligonucleotide
  Description of Combined DNA/RNA Molecule: Synthetic oligonucleotide
uguuucucaugagcugccutt

SEQ ID NO: 1156 - DNA, 21 bp, Artificial Sequence
  Description of Artificial Sequence: Synthetic oligonucleotide
  Description of Combined DNA/RNA Molecule: Synthetic oligonucleotide
auaaauugauagcacaaaatt

SEQ ID NO: 1157 - DNA, 21 bp, Artificial Sequence
  Description of Artificial Sequence: Synthetic oligonucleotide
  Description of Combined DNA/RNA Molecule: Synthetic oligonucleotide
uuuugugcuaucaauuuautt

SEQ ID NO: 1158 - DNA, 21 bp, Artificial Sequence
  Description of Artificial Sequence: Synthetic oligonucleotide
  Description of Combined DNA/RNA Molecule: Synthetic oligonucleotide
acaaaaucuagaacuuaautt

SEQ ID NO: 1159 - DNA, 21 bp, Artificial Sequence
  Description of Artificial Sequence: Synthetic oligonucleotide
  Description of Combined DNA/RNA Molecule: Synthetic oligonucleotide
auuaaguucuagauuuugutt

SEQ ID NO: 1160 - DNA, 21 bp, Artificial Sequence
  Description of Artificial Sequence: Synthetic oligonucleotide
  Description of Combined DNA/RNA Molecule: Synthetic oligonucleotide
gauaucccaacagguacgatt

SEQ ID NO: 1161 - DNA, 21 bp, Artificial Sequence
  Description of Artificial Sequence: Synthetic oligonucleotide
  Description of Combined DNA/RNA Molecule: Synthetic oligonucleotide
ucguaccuguugggauauctt

SEQ ID NO: 1162 - DNA, 21 bp, Artificial Sequence
  Description of Artificial Sequence: Synthetic oligonucleotide
  Description of Combined DNA/RNA Molecule: Synthetic oligonucleotide
aaguuauuuauacccaucatt

SEQ ID NO: 1163 - DNA, 21 bp, Artificial Sequence
  Description of Artificial Sequence: Synthetic oligonucleotide
  Description of Combined DNA/RNA Molecule: Synthetic oligonucleotide
ugauggguauaaauaacuutt

SEQ ID NO: 1164 - DNA, 21 bp, Artificial Sequence
  Description of Artificial Sequence: Synthetic oligonucleotide
  Description of Combined DNA/RNA Molecule: Synthetic oligonucleotide
uguaaauacguauuucuagtt

SEQ ID NO: 1165 - DNA, 21 bp, Artificial Sequence
  Description of Artificial Sequence: Synthetic oligonucleotide
  Description of Combined DNA/RNA Molecule: Synthetic oligonucleotide
cuagaaauacguauuuacatt

SEQ ID NO: 1166 - DNA, 21 bp, Artificial Sequence
  Description of Artificial Sequence: Synthetic oligonucleotide
  Description of Combined DNA/RNA Molecule: Synthetic oligonucleotide
ucuaguuuucauauaaagutt

SEQ ID NO: 1167 - DNA, 21 bp, Artificial Sequence
  Description of Artificial Sequence: Synthetic oligonucleotide
  Description of Combined DNA/RNA Molecule: Synthetic oligonucleotide
acuuuauaugaaaacuagatt

SEQ ID NO: 1168 - DNA, 21 bp, Artificial Sequence
  Description of Artificial Sequence: Synthetic oligonucleotide
  Description of Combined DNA/RNA Molecule: Synthetic oligonucleotide
auaaaguaguucuuuuauatt

SEQ ID NO: 1169 - DNA, 21 bp, Artificial Sequence
  Description of Artificial Sequence: Synthetic oligonucleotide
  Description of Combined DNA/RNA Molecule: Synthetic oligonucleotide
uauaaaagaacuacuuuautt

SEQ ID NO: 1170 - DNA, 21 bp, Artificial Sequence
  Description of Artificial Sequence: Synthetic oligonucleotide
  Description of Combined DNA/RNA Molecule: Synthetic oligonucleotide
ccauuuguagagcuacaaatt

SEQ ID NO: 1171 - DNA, 21 bp, Artificial Sequence
  Description of Artificial Sequence: Synthetic oligonucleotide
  Description of Combined DNA/RNA Molecule: Synthetic oligonucleotide
uuuguagcucuacaaauggtt

SEQ ID NO: 1172 - DNA, 21 bp, Artificial Sequence
  Description of Artificial Sequence: Synthetic oligonucleotide
  Description of Combined DNA/RNA Molecule: Synthetic oligonucleotide
uauuuucaguagucagaautt

SEQ ID NO: 1173 - DNA, 21 bp, Artificial Sequence
  Description of Artificial Sequence: Synthetic oligonucleotide
  Description of Combined DNA/RNA Molecule: Synthetic oligonucleotide
auucugacuacugaaaauatt

SEQ ID NO: 1174 - DNA, 21 bp, Artificial Sequence
  Description of Artificial Sequence: Synthetic oligonucleotide
  Description of Combined DNA/RNA Molecule: Synthetic oligonucleotide
aaaucuaacccuaguuguatt

SEQ ID NO: 1175 - DNA, 21 bp, Artificial Sequence
  Description of Artificial Sequence: Synthetic oligonucleotide
  Description of Combined DNA/RNA Molecule: Synthetic oligonucleotide
uacaacuaggguuagauuutt

SEQ ID NO: 1176 - DNA, 21 bp, Artificial Sequence
  Description of Artificial Sequence: Synthetic oligonucleotide
  Description of Combined DNA/RNA Molecule: Synthetic oligonucleotide
cuuuagaguauacauugcutt

SEQ ID NO: 1177 - DNA, 21 bp, Artificial Sequence
  Description of Artificial Sequence: Synthetic oligonucleotide
  Description of Combined DNA/RNA Molecule: Synthetic oligonucleotide
agcaauguauacucuaaagtt

SEQ ID NO: 1178 - DNA, 21 bp, Artificial Sequence
  Description of Artificial Sequence: Synthetic oligonucleotide
  Description of Combined DNA/RNA Molecule: Synthetic oligonucleotide
aucugacuaauggcucugutt

SEQ ID NO: 1179 - DNA, 21 bp, Artificial Sequence
  Description of Artificial Sequence: Synthetic oligonucleotide
  Description of Combined DNA/RNA Molecule: Synthetic oligonucleotide
acagagccauuagucagautt

SEQ ID NO: 1180 - DNA, 21 bp, Artificial Sequence
  Description of Artificial Sequence: Synthetic oligonucleotide
  Description of Combined DNA/RNA Molecule: Synthetic oligonucleotide
cacaaugauuuaaggacugtt

SEQ ID NO: 1181 - DNA, 21 bp, Artificial Sequence
  Description of Artificial Sequence: Synthetic oligonucleotide
  Description of Combined DNA/RNA Molecule: Synthetic oligonucleotide
caguccuuaaaucauugugtt

SEQ ID NO: 1182 - DNA, 21 bp, Artificial Sequence
  Description of Artificial Sequence: Synthetic oligonucleotide
  Description of Combined DNA/RNA Molecule: Synthetic oligonucleotide
ucuuuuucucgauucaaautt

SEQ ID NO: 1183 - DNA, 21 bp, Artificial Sequence
  Description of Artificial Sequence: Synthetic oligonucleotide
  Description of Combined DNA/RNA Molecule: Synthetic oligonucleotide
auuugaaucgagaaaaagatt

SEQ ID NO: 1184 - DNA, 21 bp, Artificial Sequence
  Description of Artificial Sequence: Synthetic oligonucleotide
  Description of Combined DNA/RNA Molecule: Synthetic oligonucleotide
cuuuuucucgauucaaauctt

SEQ ID NO: 1185 - DNA, 21 bp, Artificial Sequence
  Description of Artificial Sequence: Synthetic oligonucleotide
  Description of Combined DNA/RNA Molecule: Synthetic oligonucleotide
gauuugaaucgagaaaaagtt

SEQ ID NO: 1186 - DNA, 21 bp, Artificial Sequence
  Description of Artificial Sequence: Synthetic oligonucleotide
  Description of Combined DNA/RNA Molecule: Synthetic oligonucleotide
auuuucugcucacgaugagtt

SEQ ID NO: 1187 - DNA, 21 bp, Artificial Sequence
  Description of Artificial Sequence: Synthetic oligonucleotide
  Description of Combined DNA/RNA Molecule: Synthetic oligonucleotide
cucaucgugagcagaaaautt

SEQ ID NO: 1188 - DNA, 21 bp, Artificial Sequence
  Description of Artificial Sequence: Synthetic oligonucleotide
  Description of Combined DNA/RNA Molecule: Synthetic oligonucleotide
uuucugcucacgaugaguutt

SEQ ID NO: 1189 - DNA, 21 bp, Artificial Sequence
  Description of Artificial Sequence: Synthetic oligonucleotide
  Description of Combined DNA/RNA Molecule: Synthetic oligonucleotide
aacucaucgugagcagaaatt

SEQ ID NO: 1190 - DNA, 21 bp, Artificial Sequence
  Description of Artificial Sequence: Synthetic oligonucleotide
  Description of Combined DNA/RNA Molecule: Synthetic oligonucleotide
agagcuacaaaaccuaucctt

SEQ ID NO: 1191 - DNA, 21 bp, Artificial Sequence
  Description of Artificial Sequence: Synthetic oligonucleotide
  Description of Combined DNA/RNA Molecule: Synthetic oligonucleotide
ggauagguuuuguagcucutt

SEQ ID NO: 1192 - DNA, 21 bp, Artificial Sequence
  Description of Artificial Sequence: Synthetic oligonucleotide
  Description of Combined DNA/RNA Molecule: Synthetic oligonucleotide
gagccaaagguacaccacutt

SEQ ID NO: 1193 - DNA, 21 bp, Artificial Sequence
  Description of Artificial Sequence: Synthetic oligonucleotide
  Description of Combined DNA/RNA Molecule: Synthetic oligonucleotide
agugguguaccuuuggcuctt

SEQ ID NO: 1194 - DNA, 21 bp, Artificial Sequence
  Description of Artificial Sequence: Synthetic oligonucleotide
  Description of Combined DNA/RNA Molecule: Synthetic oligonucleotide
gccaaagguacaccacuactt

SEQ ID NO: 1195 - DNA, 21 bp, Artificial Sequence
  Description of Artificial Sequence: Synthetic oligonucleotide
  Description of Combined DNA/RNA Molecule: Synthetic oligonucleotide
guagugguguaccuuuggctt

SEQ ID NO: 1196 - DNA, 21 bp, Artificial Sequence
  Description of Artificial Sequence: Synthetic oligonucleotide
  Description of Combined DNA/RNA Molecule: Synthetic oligonucleotide
gaacuguacucuucucagctt

SEQ ID NO: 1197 - DNA, 21 bp, Artificial Sequence
  Description of Artificial Sequence: Synthetic oligonucleotide
  Description of Combined DNA/RNA Molecule: Synthetic oligonucleotide
gcugagaagaguacaguuctt

SEQ ID NO: 1198 - DNA, 21 bp, Artificial Sequence
  Description of Artificial Sequence: Synthetic oligonucleotide
  Description of Combined DNA/RNA Molecule: Synthetic oligonucleotide
agguaaauaucaccaacautt

SEQ ID NO: 1199 - DNA, 21 bp, Artificial Sequence
  Description of Artificial Sequence: Synthetic oligonucleotide
  Description of Combined DNA/RNA Molecule: Synthetic oligonucleotide
auguuggugauauuuaccutt

SEQ ID NO: 1200 - DNA, 21 bp, Artificial Sequence
  Description of Artificial Sequence: Synthetic oligonucleotide
  Description of Combined DNA/RNA Molecule: Synthetic oligonucleotide
agcuacaaaaccuauccuutt

SEQ ID NO: 1201 - DNA, 21 bp, Artificial Sequence
  Description of Artificial Sequence: Synthetic oligonucleotide
  Description of Combined DNA/RNA Molecule: Synthetic oligonucleotide
aaggauagguuuuguagcutt

SEQ ID NO: 1202 - DNA, 21 bp, Artificial Sequence
  Description of Artificial Sequence: Synthetic oligonucleotide
  Description of Combined DNA/RNA Molecule: Synthetic oligonucleotide
ugugaaagcauuuaauucctt

SEQ ID NO: 1203 - DNA, 21 bp, Artificial Sequence
  Description of Artificial Sequence: Synthetic oligonucleotide
  Description of Combined DNA/RNA Molecule: Synthetic oligonucleotide
ggaauuaaaugcuuucacatt

SEQ ID NO: 1204 - DNA, 21 bp, Artificial Sequence
  Description of Artificial Sequence: Synthetic oligonucleotide
  Description of Combined DNA/RNA Molecule: Synthetic oligonucleotide
gcccacuuuagaguauacatt

SEQ ID NO: 1205 - DNA, 21 bp, Artificial Sequence
  Description of Artificial Sequence: Synthetic oligonucleotide
  Description of Combined DNA/RNA Molecule: Synthetic oligonucleotide
uguauacucuaaagugggctt

SEQ ID NO: 1206 - DNA, 21 bp, Artificial Sequence
  Description of Artificial Sequence: Synthetic oligonucleotide
  Description of Combined DNA/RNA Molecule: Synthetic oligonucleotide
ugugccacacuccaagacctt

SEQ ID NO: 1207 - DNA, 21 bp, Artificial Sequence
  Description of Artificial Sequence: Synthetic oligonucleotide
  Description of Combined DNA/RNA Molecule: Synthetic oligonucleotide
ggucuuggaguguggcacatt

SEQ ID NO: 1208 - DNA, 21 bp, Artificial Sequence
  Description of Artificial Sequence: Synthetic oligonucleotide
  Description of Combined DNA/RNA Molecule: Synthetic oligonucleotide
aaacuaaauugaucucguatt

SEQ ID NO: 1209 - DNA, 21 bp, Artificial Sequence
  Description of Artificial Sequence: Synthetic oligonucleotide
  Description of Combined DNA/RNA Molecule: Synthetic oligonucleotide
uacgagaucaauuuaguuutt

SEQ ID NO: 1210 - DNA, 21 bp, Artificial Sequence
  Description of Artificial Sequence: Synthetic oligonucleotide
  Description of Combined DNA/RNA Molecule: Synthetic oligonucleotide
ugaucucguagaauuaucutt

SEQ ID NO: 1211 - DNA, 21 bp, Artificial Sequence
  Description of Artificial Sequence: Synthetic oligonucleotide
  Description of Combined DNA/RNA Molecule: Synthetic oligonucleotide
agauaauucuacgagaucatt

SEQ ID NO: 1212 - DNA, 21 bp, Artificial Sequence
  Description of Artificial Sequence: Synthetic oligonucleotide
  Description of Combined DNA/RNA Molecule: Synthetic oligonucleotide
gcgugcagucgguccuccatt

SEQ ID NO: 1213 - DNA, 21 bp, Artificial Sequence
  Description of Artificial Sequence: Synthetic oligonucleotide
  Description of Combined DNA/RNA Molecule: Synthetic oligonucleotide
uggaggaccgacugcacgctt

SEQ ID NO: 1214 - DNA, 21 bp, Artificial Sequence
  Description of Artificial Sequence: Synthetic oligonucleotide
  Description of Combined DNA/RNA Molecule: Synthetic oligonucleotide
aaaguuuagagacaucugatt

SEQ ID NO: 1215 - DNA, 21 bp, Artificial Sequence
  Description of Artificial Sequence: Synthetic oligonucleotide
  Description of Combined DNA/RNA Molecule: Synthetic oligonucleotide
ucagaugucucuaaacuuutt

SEQ ID NO: 1216 - DNA, 21 bp, Artificial Sequence
  Description of Artificial Sequence: Synthetic oligonucleotide
  Description of Combined DNA/RNA Molecule: Synthetic oligonucleotide
cagaaggaauauguacaaatt

SEQ ID NO: 1217 - DNA, 21 bp, Artificial Sequence
  Description of Artificial Sequence: Synthetic oligonucleotide
  Description of Combined DNA/RNA Molecule: Synthetic oligonucleotide
uuuguacauauuccuucugtt

SEQ ID NO: 1218 - DNA, 21 bp, Artificial Sequence
  Description of Artificial Sequence: Synthetic oligonucleotide
  Description of Combined DNA/RNA Molecule: Synthetic oligonucleotide
cgcccgagaguaccagggatt

SEQ ID NO: 1219 - DNA, 21 bp, Artificial Sequence
  Description of Artificial Sequence: Synthetic oligonucleotide
  Description of Combined DNA/RNA Molecule: Synthetic oligonucleotide
ucccugguacucucgggcgtt

SEQ ID NO: 1220 - DNA, 21 bp, Artificial Sequence
  Description of Artificial Sequence: Synthetic oligonucleotide
  Description of Combined DNA/RNA Molecule: Synthetic oligonucleotide
cggaggagauagaacguuutt

SEQ ID NO: 1221 - DNA, 21 bp, Artificial Sequence
  Description of Artificial Sequence: Synthetic oligonucleotide
  Description of Combined DNA/RNA Molecule: Synthetic oligonucleotide
aaacguucuaucuccuccgtt

SEQ ID NO: 1222 - DNA, 21 bp, Artificial Sequence
  Description of Artificial Sequence: Synthetic oligonucleotide
  Description of Combined DNA/RNA Molecule: Synthetic oligonucleotide
agauagaacguuuaaaacgtt

SEQ ID NO: 1223 - DNA, 21 bp, Artificial Sequence
  Description of Artificial Sequence: Synthetic oligonucleotide
  Description of Combined DNA/RNA Molecule: Synthetic oligonucleotide
cguuuuaaacguucuaucutt

SEQ ID NO: 1224 - DNA, 21 bp, Artificial Sequence
  Description of Artificial Sequence: Synthetic oligonucleotide
  Description of Combined DNA/RNA Molecule: Synthetic oligonucleotide
ggaacaggaacuucacaactt

SEQ ID NO: 1225 - DNA, 21 bp, Artificial Sequence
  Description of Artificial Sequence: Synthetic oligonucleotide
  Description of Combined DNA/RNA Molecule: Synthetic oligonucleotide
guugugaaguuccuguucctt

SEQ ID NO: 1226 - DNA, 21 bp, Artificial Sequence
  Description of Artificial Sequence: Synthetic oligonucleotide
  Description of Combined DNA/RNA Molecule: Synthetic oligonucleotide
gugagccaaagguacaccatt

SEQ ID NO: 1227 - DNA, 21 bp, Artificial Sequence
  Description of Artificial Sequence: Synthetic oligonucleotide
  Description of Combined DNA/RNA Molecule: Synthetic oligonucleotide
ugguguaccuuuggcucactt

SEQ ID NO: 1228 - DNA, 21 bp, Artificial Sequence
  Description of Artificial Sequence: Synthetic oligonucleotide
  Description of Combined DNA/RNA Molecule: Synthetic oligonucleotide
auccucccuagacuucccutt

SEQ ID NO: 1229 - DNA, 21 bp, Artificial Sequence
  Description of Artificial Sequence: Synthetic oligonucleotide
  Description of Combined DNA/RNA Molecule: Synthetic oligonucleotide
agggaagucuagggaggautt

SEQ ID NO: 1230 - DNA, 21 bp, Artificial Sequence
  Description of Artificial Sequence: Synthetic oligonucleotide
  Description of Combined DNA/RNA Molecule: Synthetic oligonucleotide
cacacuccaagaccugugctt

SEQ ID NO: 1231 - DNA, 21 bp, Artificial Sequence
  Description of Artificial Sequence: Synthetic oligonucleotide
  Description of Combined DNA/RNA Molecule: Synthetic oligonucleotide
gcacaggucuuggagugugtt

SEQ ID NO: 1232 - DNA, 21 bp, Artificial Sequence
  Description of Artificial Sequence: Synthetic oligonucleotide
  Description of Combined DNA/RNA Molecule: Synthetic oligonucleotide
acagaaggaauauguacaatt

SEQ ID NO: 1233 - DNA, 21 bp, Artificial Sequence
  Description of Artificial Sequence: Synthetic oligonucleotide
  Description of Combined DNA/RNA Molecule: Synthetic oligonucleotide
uuguacauauuccuucugutt

SEQ ID NO: 1234 - DNA, 21 bp, Artificial Sequence
  Description of Artificial Sequence: Synthetic oligonucleotide
  Description of Combined DNA/RNA Molecule: Synthetic oligonucleotide
uuagagacaucugacuuugtt

SEQ ID NO: 1235 - DNA, 21 bp, Artificial Sequence
  Description of Artificial Sequence: Synthetic oligonucleotide
  Description of Combined DNA/RNA Molecule: Synthetic oligonucleotide
caaagucagaugucucuaatt

SEQ ID NO: 1236 - DNA, 21 bp, Artificial Sequence
  Description of Artificial Sequence: Synthetic oligonucleotide
  Description of Combined DNA/RNA Molecule: Synthetic oligonucleotide
aauugaucucguagaauuatt

SEQ ID NO: 1237 - DNA, 21 bp, Artificial Sequence
  Description of Artificial Sequence: Synthetic oligonucleotide
  Description of Combined DNA/RNA Molecule: Synthetic oligonucleotide
uaauucuacgagaucaauutt

SEQ ID NO: 1238 - DNA, 21 bp, Artificial Sequence
  Description of Artificial Sequence: Synthetic oligonucleotide
  Description of Combined DNA/RNA Molecule: Synthetic oligonucleotide
accgaaguguuguuugucctt

SEQ ID NO: 1239 - DNA, 21 bp, Artificial Sequence
  Description of Artificial Sequence: Synthetic oligonucleotide
  Description of Combined DNA/RNA Molecule: Synthetic oligonucleotide
ggacaaacaacacuucggutt

SEQ ID NO: 1240 - DNA, 21 bp, Artificial Sequence
  Description of Artificial Sequence: Synthetic oligonucleotide
  Description of Combined DNA/RNA Molecule: Synthetic oligonucleotide
ucgagaaucuaaacuaacutt

SEQ ID NO: 1241 - DNA, 21 bp, Artificial Sequence
  Description of Artificial Sequence: Synthetic oligonucleotide
  Description of Combined DNA/RNA Molecule: Synthetic oligonucleotide
aguuaguuuagauucucgatt

SEQ ID NO: 1242 - RNA, 21 nt, Artificial Sequence
  Description of Artificial Sequence: Synthetic oligonucleotide
gcacauaggagagaugagcuu

SEQ ID NO: 1243 - RNA, 23 nt, Artificial Sequence
  Description of Artificial Sequence: Synthetic oligonucleotide
aagcucaucucuccuaugugcug

SEQ ID NO: 1244 - RNA, 23 nt, Artificial Sequence
  Description of Artificial Sequence: Synthetic oligonucleotide
accgaaguguuguuuguccaauu

SEQ ID NO: 1245 - RNA, 23 nt, Artificial Sequence
  Description of Artificial Sequence: Synthetic oligonucleotide
uaugguguuuggagcaucuacua

SEQ ID NO: 1246 - RNA, 23 nt, Artificial Sequence
  Description of Artificial Sequence: Synthetic oligonucleotide
aaucuaaacuaacuagaauccuc

SEQ ID NO: 1247 - RNA, 23 nt, Artificial Sequence
  Description of Artificial Sequence: Synthetic oligonucleotide
uccuuaucgagaaucuaaacuaa

SEQ ID NO: 1248 - RNA, 23 nt, Artificial Sequence
  Description of Artificial Sequence: Synthetic oligonucleotide
gauugauguuuaccgaaguguug

SEQ ID NO: 1249 - RNA, 23 nt, Artificial Sequence
  Description of Artificial Sequence: Synthetic oligonucleotide
uggugagaugcagaccauuuaau

SEQ ID NO: 1250 - RNA, 23 nt, Artificial Sequence
  Description of Artificial Sequence: Synthetic oligonucleotide
acucugaguacauuggaauaugc

SEQ ID NO: 1251 - RNA, 23 nt, Artificial Sequence
  Description of Artificial Sequence: Synthetic oligonucleotide
ccgaaguguuguuuguccaauuc

SEQ ID NO: 1252 - RNA, 23 nt, Artificial Sequence
  Description of Artificial Sequence: Synthetic oligonucleotide
aguuauuaugggcuauaauugca

SEQ ID NO: 1253 - RNA, 23 nt, Artificial Sequence
  Description of Artificial Sequence: Synthetic oligonucleotide
ggaaggugaaaggucaccuaaug

SEQ ID NO: 1254 - RNA, 23 nt, Artificial Sequence
  Description of Artificial Sequence: Synthetic oligonucleotide
uuuuacaauggaaggugaaaggu

SEQ ID NO: 1255 - RNA, 23 nt, Artificial Sequence
  Description of Artificial Sequence: Synthetic oligonucleotide
gaaggugaaaggucaccuaauga

SEQ ID NO: 1256 - RNA, 23 nt, Artificial Sequence
  Description of Artificial Sequence: Synthetic oligonucleotide
aaggugaaaggucaccuaaugaa

SEQ ID NO: 1257 - RNA, 23 nt, Artificial Sequence
  Description of Artificial Sequence: Synthetic oligonucleotide
uuccuuaucgagaaucuaaacua

SEQ ID NO: 1258 - RNA, 23 nt, Artificial Sequence
  Description of Artificial Sequence: Synthetic oligonucleotide
agcucuuauuaaggaguauacgg

SEQ ID NO: 1259 - RNA, 23 nt, Artificial Sequence
  Description of Artificial Sequence: Synthetic oligonucleotide
cagagagauucugugcuuuggag

SEQ ID NO: 1260 - RNA, 23 nt, Artificial Sequence
  Description of Artificial Sequence: Synthetic oligonucleotide
gaaucuaaacuaacuagaauccu

SEQ ID NO: 1261 - RNA, 23 nt, Artificial Sequence
  Description of Artificial Sequence: Synthetic oligonucleotide
acucaccaaaaaagcucuuauua

SEQ ID NO: 1262 - RNA, 23 nt, Artificial Sequence
  Description of Artificial Sequence: Synthetic oligonucleotide
aagagcuuuuugaucuucuuaau

SEQ ID NO: 1263 - RNA, 23 nt, Artificial Sequence
  Description of Artificial Sequence: Synthetic oligonucleotide
ggcguacaagaacaucuauaauu

SEQ ID NO: 1264 - RNA, 23 nt, Artificial Sequence
  Description of Artificial Sequence: Synthetic oligonucleotide
agauugauguuuaccgaaguguu

SEQ ID NO: 1265 - RNA, 23 nt, Artificial Sequence
  Description of Artificial Sequence: Synthetic oligonucleotide
aucuaaacuaacuagaauccucc

SEQ ID NO: 1266 - RNA, 23 nt, Artificial Sequence
  Description of Artificial Sequence: Synthetic oligonucleotide
uuaccgaaguguuguuuguccaa

SEQ ID NO: 1267 - RNA, 23 nt, Artificial Sequence
  Description of Artificial Sequence: Synthetic oligonucleotide
ggugguggugagaugcagaccau

SEQ ID NO: 1268 - RNA, 19 nt, Artificial Sequence
  Description of Artificial Sequence: Synthetic oligonucleotide
cauacucuagucguuccca

SEQ ID NO: 1269 - RNA, 19 nt, Artificial Sequence
  Description of Artificial Sequence: Synthetic oligonucleotide
agcgcccauucaauaguag

SEQ ID NO: 1270 - RNA, 19 nt, Artificial Sequence
  Description of Artificial Sequence: Synthetic oligonucleotide
ggaaagcuagcgcccauuc

SEQ ID NO: 1271 - RNA, 19 nt, Artificial Sequence
  Description of Artificial Sequence: Synthetic oligonucleotide
gaaagcuagcgcccauuca

SEQ ID NO: 1272 - RNA, 19 nt, Artificial Sequence
  Description of Artificial Sequence: Synthetic oligonucleotide
agaaacuacgauugaugga

SEQ ID NO: 1273 - RNA, 19 nt, Artificial Sequence
  Description of Artificial Sequence: Synthetic oligonucleotide
uguuccuuaucgagaaucu

SEQ ID NO: 1274 - RNA, 19 nt, Artificial Sequence
  Description of Artificial Sequence: Synthetic oligonucleotide
cagauuaccucugcgagcc

SEQ ID NO: 1275 - RNA, 19 nt, Artificial Sequence
  Description of Artificial Sequence: Synthetic oligonucleotide
gcgcccauucaauaguaga

SEQ ID NO: 1276 - RNA, 19 nt, Artificial Sequence
  Description of Artificial Sequence: Synthetic oligonucleotide
uugcacuaucuuugcguau

SEQ ID NO: 1277 - RNA, 19 nt, Artificial Sequence
  Description of Artificial Sequence: Synthetic oligonucleotide
cagagcggaaagcuagcgc

SEQ ID NO: 1278 - RNA, 19 nt, Artificial Sequence
  Description of Artificial Sequence: Synthetic oligonucleotide
agaccuuauuugguaaucu

SEQ ID NO: 1279 - RNA, 19 nt, Artificial Sequence
  Description of Artificial Sequence: Synthetic oligonucleotide
auucucuuggagggcguac

SEQ ID NO: 1280 - RNA, 19 nt, Artificial Sequence
  Description of Artificial Sequence: Synthetic oligonucleotide
ggcugguauaauuccacgu

SEQ ID NO: 1281 - RNA, 19 nt, Artificial Sequence
  Description of Artificial Sequence: Synthetic oligonucleotide
gcggaaagcuagcgcccau

SEQ ID NO: 1282 - RNA, 19 nt, Artificial Sequence
  Description of Artificial Sequence: Synthetic oligonucleotide
ugcacuaucuuugcguaug

SEQ ID NO: 1283 - RNA, 19 nt, Artificial Sequence
  Description of Artificial Sequence: Synthetic oligonucleotide
guauaauuccacguacccu

SEQ ID NO: 1284 - RNA, 19 nt, Artificial Sequence
  Description of Artificial Sequence: Synthetic oligonucleotide
agaaucuaaacuaacuaga

SEQ ID NO: 1285 - RNA, 19 nt, Artificial Sequence
  Description of Artificial Sequence: Synthetic oligonucleotide
aggagcugaauaggguuac

SEQ ID NO: 1286 - RNA, 19 nt, Artificial Sequence
  Description of Artificial Sequence: Synthetic oligonucleotide
gaaguacauaagaccuuau

SEQ ID NO: 1287 - RNA, 19 nt, Artificial Sequence
  Description of Artificial Sequence: Synthetic oligonucleotide
gacaguggccgauaagaua

SEQ ID NO: 1288 - RNA, 19 nt, Artificial Sequence
  Description of Artificial Sequence: Synthetic oligonucleotide
aaaccacuuaguagugucc

SEQ ID NO: 1289 - RNA, 19 nt, Artificial Sequence
  Description of Artificial Sequence: Synthetic oligonucleotide
ucccuagacuucccuauuu

SEQ ID NO: 1290 - RNA, 19 nt, Artificial Sequence
  Description of Artificial Sequence: Synthetic oligonucleotide
uagacuucccuauuucgcu

SEQ ID NO: 1291 - RNA, 19 nt, Artificial Sequence
  Description of Artificial Sequence: Synthetic oligonucleotide
gcgucgcagccaaauucgu

SEQ ID NO: 1292 - RNA, 19 nt, Artificial Sequence
  Description of Artificial Sequence: Synthetic oligonucleotide
agcuagcgcccauucaaua

SEQ ID NO: 1293 - RNA, 19 nt, Artificial Sequence
  Description of Artificial Sequence: Synthetic oligonucleotide
gaaacuacgauugauggag

SEQ ID NO: 1294 - RNA, 19 nt, Artificial Sequence
  Description of Artificial Sequence: Synthetic oligonucleotide
ccgauaagauagaagauca

SEQ ID NO: 1295 - RNA, 19 nt, Artificial Sequence
  Description of Artificial Sequence: Synthetic oligonucleotide
uagcgcccauucaauagua

SEQ ID NO: 1296 - RNA, 19 nt, Artificial Sequence
  Description of Artificial Sequence: Synthetic oligonucleotide
uuugcguauggccaaacug

SEQ ID NO: 1297 - RNA, 19 nt, Artificial Sequence
  Description of Artificial Sequence: Synthetic oligonucleotide
cacguacccuucaucaaau

SEQ ID NO: 1298 - RNA, 19 nt, Artificial Sequence
  Description of Artificial Sequence: Synthetic oligonucleotide
ucuuugcguauggccaaac

SEQ ID NO: 1299 - RNA, 19 nt, Artificial Sequence
  Description of Artificial Sequence: Synthetic oligonucleotide
ccgaaguguuguuugucca

SEQ ID NO: 1300 - RNA, 19 nt, Artificial Sequence
  Description of Artificial Sequence: Synthetic oligonucleotide
agagcggaaagcuagcgcc

SEQ ID NO: 1301 - RNA, 19 nt, Artificial Sequence
  Description of Artificial Sequence: Synthetic oligonucleotide
gcuagcgcccauucaauag

SEQ ID NO: 1302 - RNA, 19 nt, Artificial Sequence
  Description of Artificial Sequence: Synthetic oligonucleotide
aaguuaguguacgaacugg

SEQ ID NO: 1303 - RNA, 19 nt, Artificial Sequence
  Description of Artificial Sequence: Synthetic oligonucleotide
guacgaacuggaggauugg

SEQ ID NO: 1304 - RNA, 19 nt, Artificial Sequence
  Description of Artificial Sequence: Synthetic oligonucleotide
acgaacuggaggauuggcu

SEQ ID NO: 1305 - RNA, 19 nt, Artificial Sequence
  Description of Artificial Sequence: Synthetic oligonucleotide
agauugauguuuaccgaag

SEQ ID NO: 1306 - RNA, 19 nt, Artificial Sequence
  Description of Artificial Sequence: Synthetic oligonucleotide
uaugggcuauaauugcacu

SEQ ID NO: 1307 - RNA, 19 nt, Artificial Sequence
  Description of Artificial Sequence: Synthetic oligonucleotide
aucuuugcguauggccaaa

SEQ ID NO: 1308 - RNA, 19 nt, Artificial Sequence
  Description of Artificial Sequence: Synthetic oligonucleotide
acucuagucguucccacuc

SEQ ID NO: 1309 - RNA, 19 nt, Artificial Sequence
  Description of Artificial Sequence: Synthetic oligonucleotide
aacuacgauugauggagaa

SEQ ID NO: 1310 - RNA, 19 nt, Artificial Sequence
  Description of Artificial Sequence: Synthetic oligonucleotide
gauaagagagcucgggaag

SEQ ID NO: 1311 - RNA, 19 nt, Artificial Sequence
  Description of Artificial Sequence: Synthetic oligonucleotide
ucgagaaucuaaacuaacu

SEQ ID NO: 1312 - RNA, 19 nt, Artificial Sequence
  Description of Artificial Sequence: Synthetic oligonucleotide
aacuaacuagaauccucca

SEQ ID NO: 1313 - RNA, 19 nt, Artificial Sequence
  Description of Artificial Sequence: Synthetic oligonucleotide
ggaucguaagaaggcaguu

SEQ ID NO: 1314 - RNA, 19 nt, Artificial Sequence
  Description of Artificial Sequence: Synthetic oligonucleotide
aucguaagaaggcaguuga

SEQ ID NO: 1315 - RNA, 19 nt, Artificial Sequence
  Description of Artificial Sequence: Synthetic oligonucleotide
aggcaguugaccaacacaa

SEQ ID NO: 1316 - RNA, 19 nt, Artificial Sequence
  Description of Artificial Sequence: Synthetic oligonucleotide
uggccgauaagauagaaga

SEQ ID NO: 1317 - RNA, 19 nt, Artificial Sequence
  Description of Artificial Sequence: Synthetic oligonucleotide
ucuaaggauauagucaaca

SEQ ID NO: 1318 - RNA, 19 nt, Artificial Sequence
  Description of Artificial Sequence: Synthetic oligonucleotide
acuaagcuuaauugcuuuc

SEQ ID NO: 1319 - RNA, 19 nt, Artificial Sequence
  Description of Artificial Sequence: Synthetic oligonucleotide
gcccagaucaaccuuuaau

SEQ ID NO: 1320 - RNA, 19 nt, Artificial Sequence
  Description of Artificial Sequence: Synthetic oligonucleotide
uuaauuuggcagagcggaa

SEQ ID NO: 1321 - RNA, 19 nt, Artificial Sequence
  Description of Artificial Sequence: Synthetic oligonucleotide
uuaucgagaaucuaaacua

SEQ ID NO: 1322 - RNA, 19 nt, Artificial Sequence
  Description of Artificial Sequence: Synthetic oligonucleotide
cuagcgcccauucaauagu

SEQ ID NO: 1323 - RNA, 19 nt, Artificial Sequence
  Description of Artificial Sequence: Synthetic oligonucleotide
aauaguagaaugugauccu

SEQ ID NO: 1324 - RNA, 19 nt, Artificial Sequence
  Description of Artificial Sequence: Synthetic oligonucleotide
uacgaaaagaaguuagugu

SEQ ID NO: 1325 - RNA, 19 nt, Artificial Sequence
  Description of Artificial Sequence: Synthetic oligonucleotide
agaaguuaguguacgaacu

SEQ ID NO: 1326 - RNA, 19 nt, Artificial Sequence
  Description of Artificial Sequence: Synthetic oligonucleotide
acuaaacagauugauguuu

SEQ ID NO: 1327 - RNA, 19 nt, Artificial Sequence
  Description of Artificial Sequence: Synthetic oligonucleotide
cuuugcguauggccaaacu

SEQ ID NO: 1328 - RNA, 19 nt, Artificial Sequence
  Description of Artificial Sequence: Synthetic oligonucleotide
aaugaagaguauaccuggg

SEQ ID NO: 1329 - RNA, 19 nt, Artificial Sequence
  Description of Artificial Sequence: Synthetic oligonucleotide
auaauuccacguacccuuc

SEQ ID NO: 1330 - RNA, 19 nt, Artificial Sequence
  Description of Artificial Sequence: Synthetic oligonucleotide
acguacccuucaucaaauu

SEQ ID NO: 1331 - RNA, 19 nt, Artificial Sequence
  Description of Artificial Sequence: Synthetic oligonucleotide
cguacccuucaucaaauuu

SEQ ID NO: 1332 - RNA, 19 nt, Artificial Sequence
  Description of Artificial Sequence: Synthetic oligonucleotide
guacccuucaucaaauuuu

SEQ ID NO: 1333 - RNA, 19 nt, Artificial Sequence
  Description of Artificial Sequence: Synthetic oligonucleotide
aacuuacugauaaugguac

SEQ ID NO: 1334 - RNA, 19 nt, Artificial Sequence
  Description of Artificial Sequence: Synthetic oligonucleotide
uucagucaaagugucucug

SEQ ID NO: 1335 - RNA, 19 nt, Artificial Sequence
  Description of Artificial Sequence: Synthetic oligonucleotide
uucuuaauccaucaucuga

SEQ ID NO: 1336 - RNA, 19 nt, Artificial Sequence
  Description of Artificial Sequence: Synthetic oligonucleotide
acaguacacaacaaggaug

SEQ ID NO: 1337 - RNA, 19 nt, Artificial Sequence
  Description of Artificial Sequence: Synthetic oligonucleotide
aagaaacuacgauugaugg

SEQ ID NO: 1338 - RNA, 19 nt, Artificial Sequence
  Description of Artificial Sequence: Synthetic oligonucleotide
aaacuacgauugauggaga

SEQ ID NO: 1339 - RNA, 19 nt, Artificial Sequence
  Description of Artificial Sequence: Synthetic oligonucleotide
uggagcuguugauaagaga

SEQ ID NO: 1340 - RNA, 19 nt, Artificial Sequence
  Description of Artificial Sequence: Synthetic oligonucleotide
cuaacuagaauccuccagg

SEQ ID NO: 1341 - RNA, 19 nt, Artificial Sequence
  Description of Artificial Sequence: Synthetic oligonucleotide
gaauaugcucauagagcaa

SEQ ID NO: 1342 - RNA, 19 nt, Artificial Sequence
  Description of Artificial Sequence: Synthetic oligonucleotide
augcucauagagcaaagaa

SEQ ID NO: 1343 - RNA, 19 nt, Artificial Sequence
  Description of Artificial Sequence: Synthetic oligonucleotide
aaaaauuggugcuguugag

SEQ ID NO: 1344 - RNA, 19 nt, Artificial Sequence
  Description of Artificial Sequence: Synthetic oligonucleotide
gaggagcugaauaggguua

SEQ ID NO: 1345 - RNA, 19 nt, Artificial Sequence
  Description of Artificial Sequence: Synthetic oligonucleotide
ggagcugaauaggguuaca

SEQ ID NO: 1346 - RNA, 19 nt, Artificial Sequence
  Description of Artificial Sequence: Synthetic oligonucleotide
gagcugaauaggguuacag

SEQ ID NO: 1347 - RNA, 19 nt, Artificial Sequence
  Description of Artificial Sequence: Synthetic oligonucleotide
agcugaauaggguuacaga

SEQ ID NO: 1348 - RNA, 19 nt, Artificial Sequence
  Description of Artificial Sequence: Synthetic oligonucleotide
gcugaauaggguuacagag

SEQ ID NO: 1349 - RNA, 19 nt, Artificial Sequence
  Description of Artificial Sequence: Synthetic oligonucleotide
ccaaacuggaucguaagaa

SEQ ID NO: 1350 - RNA, 19 nt, Artificial Sequence
  Description of Artificial Sequence: Synthetic oligonucleotide
gaucguaagaaggcaguug

SEQ ID NO: 1351 - RNA, 19 nt, Artificial Sequence
  Description of Artificial Sequence: Synthetic oligonucleotide
accuuauuugguaaucugc

SEQ ID NO: 1352 - RNA, 19 nt, Artificial Sequence
  Description of Artificial Sequence: Synthetic oligonucleotide
uuagauaccauuacuacag

SEQ ID NO: 1353 - RNA, 19 nt, Artificial Sequence
  Description of Artificial Sequence: Synthetic oligonucleotide
auaccauuacuacaguagc

SEQ ID NO: 1354 - RNA, 19 nt, Artificial Sequence
  Description of Artificial Sequence: Synthetic oligonucleotide
uacuacaguagcacuugga

SEQ ID NO: 1355 - RNA, 19 nt, Artificial Sequence
  Description of Artificial Sequence: Synthetic oligonucleotide
aaaguaaaacuguacuaca

SEQ ID NO: 1356 - RNA, 19 nt, Artificial Sequence
  Description of Artificial Sequence: Synthetic oligonucleotide
cucaagacugaucuucuaa

SEQ ID NO: 1357 - RNA, 19 nt, Artificial Sequence
  Description of Artificial Sequence: Synthetic oligonucleotide
uugacaguggccgauaaga

SEQ ID NO: 1358 - RNA, 19 nt, Artificial Sequence
  Description of Artificial Sequence: Synthetic oligonucleotide
ugacaguggccgauaagau

SEQ ID NO: 1359 - RNA, 19 nt, Artificial Sequence
  Description of Artificial Sequence: Synthetic oligonucleotide
gcaauguggaaaccuaacu

SEQ ID NO: 1360 - RNA, 19 nt, Artificial Sequence
  Description of Artificial Sequence: Synthetic oligonucleotide
ccacuuaguaguguccagg

SEQ ID NO: 1361 - RNA, 19 nt, Artificial Sequence
  Description of Artificial Sequence: Synthetic oligonucleotide
agaagguacaaaauugguu

SEQ ID NO: 1362 - RNA, 19 nt, Artificial Sequence
  Description of Artificial Sequence: Synthetic oligonucleotide
ugguuugacuaagcuuaau

SEQ ID NO: 1363 - RNA, 19 nt, Artificial Sequence
  Description of Artificial Sequence: Synthetic oligonucleotide
gguuugacuaagcuuaauu

SEQ ID NO: 1364 - RNA, 19 nt, Artificial Sequence
  Description of Artificial Sequence: Synthetic oligonucleotide
ucuaagucaagagccaucu

SEQ ID NO: 1365 - RNA, 19 nt, Artificial Sequence
  Description of Artificial Sequence: Synthetic oligonucleotide
ucaucccuauaguucacuu

SEQ ID NO: 1366 - RNA, 19 nt, Artificial Sequence
  Description of Artificial Sequence: Synthetic oligonucleotide
caucccuauaguucacuuu

SEQ ID NO: 1367 - RNA, 19 nt, Artificial Sequence
  Description of Artificial Sequence: Synthetic oligonucleotide
cccuagacuucccuauuuc

SEQ ID NO: 1368 - RNA, 19 nt, Artificial Sequence
  Description of Artificial Sequence: Synthetic oligonucleotide
agacuucccuauuucgcuu

SEQ ID NO: 1369 - RNA, 19 nt, Artificial Sequence
  Description of Artificial Sequence: Synthetic oligonucleotide
ucaccaaaccauuuguaga

SEQ ID NO: 1370 - RNA, 19 nt, Artificial Sequence
  Description of Artificial Sequence: Synthetic oligonucleotide
uccuuuaagaggccuaacu

SEQ ID NO: 1371 - RNA, 19 nt, Artificial Sequence
  Description of Artificial Sequence: Synthetic oligonucleotide
uuuaagaggccuaacucau

SEQ ID NO: 1372 - RNA, 19 nt, Artificial Sequence
  Description of Artificial Sequence: Synthetic oligonucleotide
uuaagaggccuaacucauu

SEQ ID NO: 1373 - RNA, 19 nt, Artificial Sequence
  Description of Artificial Sequence: Synthetic oligonucleotide
ggccuaacucauucacccu

SEQ ID NO: 1374 - RNA, 19 nt, Artificial Sequence
  Description of Artificial Sequence: Synthetic oligonucleotide
ugguauuuuugaucuggca

SEQ ID NO: 1375 - RNA, 19 nt, Artificial Sequence
  Description of Artificial Sequence: Synthetic oligonucleotide
aguuuaguguguaaaguuu

SEQ ID NO: 1376 - RNA, 19 nt, Artificial Sequence
  Description of Artificial Sequence: Synthetic oligonucleotide
gccaaauucgucugcgaag

SEQ ID NO: 1377 - RNA, 19 nt, Artificial Sequence
  Description of Artificial Sequence: Synthetic oligonucleotide
aauucgucugcgaagaaga

SEQ ID NO: 1378 - RNA, 19 nt, Artificial Sequence
  Description of Artificial Sequence: Synthetic oligonucleotide
ugaaaggucaccuaaugaa

SEQ ID NO: 1379 - RNA, 19 nt, Artificial Sequence
  Description of Artificial Sequence: Synthetic oligonucleotide
cagaccauuuaauuuggca

SEQ ID NO: 1380 - RNA, 19 nt, Artificial Sequence
  Description of Artificial Sequence: Synthetic oligonucleotide
agaccauuuaauuuggcag

SEQ ID NO: 1381 - RNA, 19 nt, Artificial Sequence
  Description of Artificial Sequence: Synthetic oligonucleotide
aguuauuaugggcuauaau

SEQ ID NO: 1382 - RNA, 19 nt, Artificial Sequence
  Description of Artificial Sequence: Synthetic oligonucleotide
gcugguauaauuccacgua

SEQ ID NO: 1383 - RNA, 19 nt, Artificial Sequence
  Description of Artificial Sequence: Synthetic oligonucleotide
auuuaauuuggcagagcgg

SEQ ID NO: 1384 - RNA, 19 nt, Artificial Sequence
  Description of Artificial Sequence: Synthetic oligonucleotide
uuuaauuuggcagagcgga

SEQ ID NO: 1385 - RNA, 19 nt, Artificial Sequence
  Description of Artificial Sequence: Synthetic oligonucleotide
uuuggcagagcggaaagcu

SEQ ID NO: 1386 - RNA, 19 nt, Artificial Sequence
  Description of Artificial Sequence: Synthetic oligonucleotide
uuuuacaauggaaggugaa

SEQ ID NO: 1387 - RNA, 19 nt, Artificial Sequence
  Description of Artificial Sequence: Synthetic oligonucleotide
aauggaaggugaaagguca

SEQ ID NO: 1388 - RNA, 19 nt, Artificial Sequence
  Description of Artificial Sequence: Synthetic oligonucleotide
ugagaugcagaccauuuaa

SEQ ID NO: 1389 - RNA, 19 nt, Artificial Sequence
  Description of Artificial Sequence: Synthetic oligonucleotide
ucgcagccaaauucgucug

SEQ ID NO: 1390 - RNA, 19 nt, Artificial Sequence
  Description of Artificial Sequence: Synthetic oligonucleotide
ggcuauaauugcacuaucu

SEQ ID NO: 1391 - RNA, 19 nt, Artificial Sequence
  Description of Artificial Sequence: Synthetic oligonucleotide
auugacaguggccgauaag

SEQ ID NO: 1392 - RNA, 19 nt, Artificial Sequence
  Description of Artificial Sequence: Synthetic oligonucleotide
cuagacuucccuauuucgc

SEQ ID NO: 1393 - RNA, 19 nt, Artificial Sequence
  Description of Artificial Sequence: Synthetic oligonucleotide
acuaucuuugcguauggcc

SEQ ID NO: 1394 - RNA, 19 nt, Artificial Sequence
  Description of Artificial Sequence: Synthetic oligonucleotide
auacucuagucguucccac

SEQ ID NO: 1395 - RNA, 19 nt, Artificial Sequence
  Description of Artificial Sequence: Synthetic oligonucleotide
aaagaaacuacgauugaug

SEQ ID NO: 1396 - RNA, 19 nt, Artificial Sequence
  Description of Artificial Sequence: Synthetic oligonucleotide
gccuugauuuuuuggcggg

SEQ ID NO: 1397 - RNA, 19 nt, Artificial Sequence
  Description of Artificial Sequence: Synthetic oligonucleotide
cgcccauucaauaguagaa

SEQ ID NO: 1398 - RNA, 19 nt, Artificial Sequence
  Description of Artificial Sequence: Synthetic oligonucleotide
ccuuauuugguaaucugcu

SEQ ID NO: 1399 - RNA, 19 nt, Artificial Sequence
  Description of Artificial Sequence: Synthetic oligonucleotide
agagacaauuccggaugug

SEQ ID NO: 1400 - RNA, 19 nt, Artificial Sequence
  Description of Artificial Sequence: Synthetic oligonucleotide
ugacuuugauagcuaaauu

SEQ ID NO: 1401 - RNA, 19 nt, Artificial Sequence
  Description of Artificial Sequence: Synthetic oligonucleotide
uggcagagcggaaagcuag

SEQ ID NO: 1402 - RNA, 19 nt, Artificial Sequence
  Description of Artificial Sequence: Synthetic oligonucleotide
gagcggaaagcuagcgccc

SEQ ID NO: 1403 - RNA, 19 nt, Artificial Sequence
  Description of Artificial Sequence: Synthetic oligonucleotide
aaagaaguuaguguacgaa

SEQ ID NO: 1404 - RNA, 19 nt, Artificial Sequence
  Description of Artificial Sequence: Synthetic oligonucleotide
auugcacuaucuuugcgua

SEQ ID NO: 1405 - RNA, 19 nt, Artificial Sequence
  Description of Artificial Sequence: Synthetic oligonucleotide
gguauaauuccacguaccc

SEQ ID NO: 1406 - RNA, 19 nt, Artificial Sequence
  Description of Artificial Sequence: Synthetic oligonucleotide
uacucuagucguucccacu

SEQ ID NO: 1407 - RNA, 19 nt, Artificial Sequence
  Description of Artificial Sequence: Synthetic oligonucleotide
uaugaaagaaacuacgauu

SEQ ID NO: 1408 - RNA, 19 nt, Artificial Sequence
  Description of Artificial Sequence: Synthetic oligonucleotide
augcuagaaguacauaaga

SEQ ID NO: 1409 - RNA, 19 nt, Artificial Sequence
  Description of Artificial Sequence: Synthetic oligonucleotide
aaguacauaagaccuuauu

SEQ ID NO: 1410 - RNA, 19 nt, Artificial Sequence
  Description of Artificial Sequence: Synthetic oligonucleotide
acagccugagcuguuaaug

SEQ ID NO: 1411 - RNA, 19 nt, Artificial Sequence
  Description of Artificial Sequence: Synthetic oligonucleotide
aaagaagagacaauuccgg

SEQ ID NO: 1412 - RNA, 19 nt, Artificial Sequence
  Description of Artificial Sequence: Synthetic oligonucleotide
cacacuggagaggucuaaa

SEQ ID NO: 1413 - RNA, 19 nt, Artificial Sequence
  Description of Artificial Sequence: Synthetic oligonucleotide
cacuggagaggucuaaagu

SEQ ID NO: 1414 - RNA, 19 nt, Artificial Sequence
  Description of Artificial Sequence: Synthetic oligonucleotide
acuggagaggucuaaagug

SEQ ID NO: 1415 - RNA, 19 nt, Artificial Sequence
  Description of Artificial Sequence: Synthetic oligonucleotide
cgucgcagccaaauucguc

SEQ ID NO: 1416 - RNA, 19 nt, Artificial Sequence
  Description of Artificial Sequence: Synthetic oligonucleotide
gaaggcaguugaccaacac

SEQ ID NO: 1417 - RNA, 19 nt, Artificial Sequence
  Description of Artificial Sequence: Synthetic oligonucleotide
cauucacccugacagaguu

SEQ ID NO: 1418 - RNA, 19 nt, Artificial Sequence
  Description of Artificial Sequence: Synthetic oligonucleotide
aagaggccuaacucauuca

SEQ ID NO: 1419 - RNA, 19 nt, Artificial Sequence
  Description of Artificial Sequence: Synthetic oligonucleotide
gagacaauuccggaugugg

SEQ ID NO: 1420 - RNA, 19 nt, Artificial Sequence
  Description of Artificial Sequence: Synthetic oligonucleotide
uuccggauguggauguaga

SEQ ID NO: 1421 - RNA, 19 nt, Artificial Sequence
  Description of Artificial Sequence: Synthetic oligonucleotide
aagcuagcgcccauucaau

SEQ ID NO: 1422 - RNA, 19 nt, Artificial Sequence
  Description of Artificial Sequence: Synthetic oligonucleotide
gaaguuaguguacgaacug

SEQ ID NO: 1423 - RNA, 19 nt, Artificial Sequence
  Description of Artificial Sequence: Synthetic oligonucleotide
uauaauuccacguacccuu

SEQ ID NO: 1424 - RNA, 19 nt, Artificial Sequence
  Description of Artificial Sequence: Synthetic oligonucleotide
acaguggccgauaagauag

SEQ ID NO: 1425 - RNA, 19 nt, Artificial Sequence
  Description of Artificial Sequence: Synthetic oligonucleotide
ucugucaucccuauaguuc

SEQ ID NO: 1426 - RNA, 19 nt, Artificial Sequence
  Description of Artificial Sequence: Synthetic oligonucleotide
uucuugcuaugacuugugu

SEQ ID NO: 1427 - RNA, 19 nt, Artificial Sequence
  Description of Artificial Sequence: Synthetic oligonucleotide
guaagaaggcaguugacca

SEQ ID NO: 1428 - RNA, 19 nt, Artificial Sequence
  Description of Artificial Sequence: Synthetic oligonucleotide
cauugacaguggccgauaa

SEQ ID NO: 1429 - RNA, 19 nt, Artificial Sequence
  Description of Artificial Sequence: Synthetic oligonucleotide
agaaaccacuuaguagugu

SEQ ID NO: 1430 - RNA, 19 nt, Artificial Sequence
  Description of Artificial Sequence: Synthetic oligonucleotide
ggauuguucaucaauuggc

SEQ ID NO: 1431 - RNA, 19 nt, Artificial Sequence
  Description of Artificial Sequence: Synthetic oligonucleotide
uaagaggccuaacucauuc

SEQ ID NO: 1432 - RNA, 19 nt, Artificial Sequence
  Description of Artificial Sequence: Synthetic oligonucleotide
aguuaguguacgaacugga

SEQ ID NO: 1433 - RNA, 19 nt, Artificial Sequence
  Description of Artificial Sequence: Synthetic oligonucleotide
aguacauaagaccuuauuu

SEQ ID NO: 1434 - RNA, 19 nt, Artificial Sequence
  Description of Artificial Sequence: Synthetic oligonucleotide
ugagccuuguguauagauu

SEQ ID NO: 1435 - RNA, 19 nt, Artificial Sequence
  Description of Artificial Sequence: Synthetic oligonucleotide
ccuuuaagaggccuaacuc

SEQ ID NO: 1436 - RNA, 19 nt, Artificial Sequence
  Description of Artificial Sequence: Synthetic oligonucleotide
accacuuaguaguguccag

SEQ ID NO: 1437 - RNA, 19 nt, Artificial Sequence
  Description of Artificial Sequence: Synthetic oligonucleotide
gaaacuuccaauuaugucu

SEQ ID NO: 1438 - RNA, 19 nt, Artificial Sequence
  Description of Artificial Sequence: Synthetic oligonucleotide
ugcauacucuagucguucc

SEQ ID NO: 1439 - RNA, 19 nt, Artificial Sequence
  Description of Artificial Sequence: Synthetic oligonucleotide
agaaggcaguugaccaaca

SEQ ID NO: 1440 - RNA, 19 nt, Artificial Sequence
  Description of Artificial Sequence: Synthetic oligonucleotide
guacauaagaccuuauuug

SEQ ID NO: 1441 - RNA, 19 nt, Artificial Sequence
  Description of Artificial Sequence: Synthetic oligonucleotide
uauaauugcacuaucuuug

SEQ ID NO: 1442 - RNA, 19 nt, Artificial Sequence
  Description of Artificial Sequence: Synthetic oligonucleotide
ucucuguuacaauacauau

SEQ ID NO: 1443 - RNA, 19 nt, Artificial Sequence
  Description of Artificial Sequence: Synthetic oligonucleotide
uaugcucauagagcaaaga

SEQ ID NO: 1444 - RNA, 19 nt, Artificial Sequence
  Description of Artificial Sequence: Synthetic oligonucleotide
uguuguuuguccaauucug

SEQ ID NO: 1445 - RNA, 19 nt, Artificial Sequence
  Description of Artificial Sequence: Synthetic oligonucleotide
acuaacuagaauccuccag

SEQ ID NO: 1446 - RNA, 19 nt, Artificial Sequence
  Description of Artificial Sequence: Synthetic oligonucleotide
uguggugucuauacugaaa

SEQ ID NO: 1447 - RNA, 19 nt, Artificial Sequence
  Description of Artificial Sequence: Synthetic oligonucleotide
uauuaugggagaccaccca

SEQ ID NO: 1448 - RNA, 19 nt, Artificial Sequence
  Description of Artificial Sequence: Synthetic oligonucleotide
aaggaugaagucuaucaaa

SEQ ID NO: 1449 - RNA, 19 nt, Artificial Sequence
  Description of Artificial Sequence: Synthetic oligonucleotide
uugauaagagagcucggga

SEQ ID NO: 1450 - RNA, 19 nt, Artificial Sequence
  Description of Artificial Sequence: Synthetic oligonucleotide
auguuccuuaucgagaauc

SEQ ID NO: 1451 - RNA, 19 nt, Artificial Sequence
  Description of Artificial Sequence: Synthetic oligonucleotide
ggaauaugcucauagagca

SEQ ID NO: 1452 - RNA, 19 nt, Artificial Sequence
  Description of Artificial Sequence: Synthetic oligonucleotide
ccauuccaaacuggaucgu

SEQ ID NO: 1453 - RNA, 19 nt, Artificial Sequence
  Description of Artificial Sequence: Synthetic oligonucleotide
ggcaguugaccaacacaau

SEQ ID NO: 1454 - RNA, 19 nt, Artificial Sequence
  Description of Artificial Sequence: Synthetic oligonucleotide
caugcuagaaguacauaag

SEQ ID NO: 1455 - RNA, 19 nt, Artificial Sequence
  Description of Artificial Sequence: Synthetic oligonucleotide
cuagaaguacauaagaccu

SEQ ID NO: 1456 - RNA, 19 nt, Artificial Sequence
  Description of Artificial Sequence: Synthetic oligonucleotide
uuggaucucucacaucuau

SEQ ID NO: 1457 - RNA, 19 nt, Artificial Sequence
  Description of Artificial Sequence: Synthetic oligonucleotide
aacuguggugucuauacug

SEQ ID NO: 1458 - RNA, 19 nt, Artificial Sequence
  Description of Artificial Sequence: Synthetic oligonucleotide
ucauugacaguggccgaua

SEQ ID NO: 1459 - RNA, 19 nt, Artificial Sequence
  Description of Artificial Sequence: Synthetic oligonucleotide
auaaagcagacccauuccc

SEQ ID NO: 1460 - RNA, 19 nt, Artificial Sequence
  Description of Artificial Sequence: Synthetic oligonucleotide
acagaaaccacuuaguagu

SEQ ID NO: 1461 - RNA, 19 nt, Artificial Sequence
  Description of Artificial Sequence: Synthetic oligonucleotide
gaaaccacuuaguaguguc

SEQ ID NO: 1462 - RNA, 19 nt, Artificial Sequence
  Description of Artificial Sequence: Synthetic oligonucleotide
aaaucuaaggauauaguca

SEQ ID NO: 1463 - RNA, 19 nt, Artificial Sequence
  Description of Artificial Sequence: Synthetic oligonucleotide
uuauuuauacccaucaaca

SEQ ID NO: 1464 - RNA, 19 nt, Artificial Sequence
  Description of Artificial Sequence: Synthetic oligonucleotide
acagaggcauuaacacacu

SEQ ID NO: 1465 - RNA, 19 nt, Artificial Sequence
  Description of Artificial Sequence: Synthetic oligonucleotide
acacacuggagaggucuaa

SEQ ID NO: 1466 - RNA, 19 nt, Artificial Sequence
  Description of Artificial Sequence: Synthetic oligonucleotide
acacuggagaggucuaaag

SEQ ID NO: 1467 - RNA, 19 nt, Artificial Sequence
  Description of Artificial Sequence: Synthetic oligonucleotide
cgagcccagaucaaccuuu

SEQ ID NO: 1468 - RNA, 19 nt, Artificial Sequence
  Description of Artificial Sequence: Synthetic oligonucleotide
ucccuauuucgcuuucucc

SEQ ID NO: 1469 - RNA, 19 nt, Artificial Sequence
  Description of Artificial Sequence: Synthetic oligonucleotide
ucuaaaaucacugucaaca

SEQ ID NO: 1470 - RNA, 19 nt, Artificial Sequence
  Description of Artificial Sequence: Synthetic oligonucleotide
agccaaauucgucugcgaa

SEQ ID NO: 1471 - RNA, 19 nt, Artificial Sequence
  Description of Artificial Sequence: Synthetic oligonucleotide
cccauucaauaguagaaug

SEQ ID NO: 1472 - RNA, 19 nt, Artificial Sequence
  Description of Artificial Sequence: Synthetic oligonucleotide
gaugaaugcauacucuagu

SEQ ID NO: 1473 - RNA, 19 nt, Artificial Sequence
  Description of Artificial Sequence: Synthetic oligonucleotide
cucauguuccuuaucgaga

SEQ ID NO: 1474 - RNA, 19 nt, Artificial Sequence
  Description of Artificial Sequence: Synthetic oligonucleotide
gagaaucuaaacuaacuag

SEQ ID NO: 1475 - RNA, 19 nt, Artificial Sequence
  Description of Artificial Sequence: Synthetic oligonucleotide
uagaaguacauaagaccuu

SEQ ID NO: 1476 - RNA, 19 nt, Artificial Sequence
  Description of Artificial Sequence: Synthetic oligonucleotide
cagccugagcuguuaauga

SEQ ID NO: 1477 - RNA, 19 nt, Artificial Sequence
  Description of Artificial Sequence: Synthetic oligonucleotide
aagaagagacaauuccgga

SEQ ID NO: 1478 - RNA, 19 nt, Artificial Sequence
  Description of Artificial Sequence: Synthetic oligonucleotide
ugcugguguggauuguuca

SEQ ID NO: 1479 - RNA, 19 nt, Artificial Sequence
  Description of Artificial Sequence: Synthetic oligonucleotide
aaauucgucugcgaagaag

SEQ ID NO: 1480 - RNA, 19 nt, Artificial Sequence
  Description of Artificial Sequence: Synthetic oligonucleotide
uuucuggaaguugagaugu

SEQ ID NO: 1481 - RNA, 19 nt, Artificial Sequence
  Description of Artificial Sequence: Synthetic oligonucleotide
uacuaaacagauugauguu

SEQ ID NO: 1482 - RNA, 19 nt, Artificial Sequence
  Description of Artificial Sequence: Synthetic oligonucleotide
gauugauguuuaccgaagu

SEQ ID NO: 1483 - RNA, 19 nt, Artificial Sequence
  Description of Artificial Sequence: Synthetic oligonucleotide
gcacuaucuuugcguaugg

SEQ ID NO: 1484 - RNA, 19 nt, Artificial Sequence
  Description of Artificial Sequence: Synthetic oligonucleotide
ugguauaauuccacguacc

SEQ ID NO: 1485 - RNA, 19 nt, Artificial Sequence
  Description of Artificial Sequence: Synthetic oligonucleotide
agcaagcugcuuaacacag

SEQ ID NO: 1486 - RNA, 19 nt, Artificial Sequence
  Description of Artificial Sequence: Synthetic oligonucleotide
cagaaaccacuuaguagug

SEQ ID NO: 1487 - RNA, 19 nt, Artificial Sequence
  Description of Artificial Sequence: Synthetic oligonucleotide
aacuuauuggagguuguaa

SEQ ID NO: 1488 - RNA, 19 nt, Artificial Sequence
  Description of Artificial Sequence: Synthetic oligonucleotide
cuggagaggucuaaagugg

SEQ ID NO: 1489 - RNA, 19 nt, Artificial Sequence
  Description of Artificial Sequence: Synthetic oligonucleotide
aaaaaagauauaaggcagu

SEQ ID NO: 1490 - RNA, 19 nt, Artificial Sequence
  Description of Artificial Sequence: Synthetic oligonucleotide
gaauuuugauaucuaccca

SEQ ID NO: 1491 - RNA, 19 nt, Artificial Sequence
  Description of Artificial Sequence: Synthetic oligonucleotide
guauuuuugaucuggcaac

SEQ ID NO: 1492 - RNA, 19 nt, Artificial Sequence
  Description of Artificial Sequence: Synthetic oligonucleotide
aggaucccuuggcugguau

SEQ ID NO: 1493 - RNA, 19 nt, Artificial Sequence
  Description of Artificial Sequence: Synthetic oligonucleotide
ggaucccuuggcugguaua

SEQ ID NO: 1494 - RNA, 19 nt, Artificial Sequence
  Description of Artificial Sequence: Synthetic oligonucleotide
caauaguagaaugugaucc

SEQ ID NO: 1495 - RNA, 19 nt, Artificial Sequence
  Description of Artificial Sequence: Synthetic oligonucleotide
gcuauaauugcacuaucuu

SEQ ID NO: 1496 - RNA, 19 nt, Artificial Sequence
  Description of Artificial Sequence: Synthetic oligonucleotide
uacccuucaucaaauuuuu

SEQ ID NO: 1497 - RNA, 19 nt, Artificial Sequence
  Description of Artificial Sequence: Synthetic oligonucleotide
agaacauauugaauaagcc

SEQ ID NO: 1498 - RNA, 19 nt, Artificial Sequence
  Description of Artificial Sequence: Synthetic oligonucleotide
aaauuggugcuguugagga

SEQ ID NO: 1499 - RNA, 19 nt, Artificial Sequence
  Description of Artificial Sequence: Synthetic oligonucleotide
ugaauaggguuacagaguu

SEQ ID NO: 1500 - RNA, 19 nt, Artificial Sequence
  Description of Artificial Sequence: Synthetic oligonucleotide
aagaacuugaaaccacuca

SEQ ID NO: 1501 - RNA, 19 nt, Artificial Sequence
  Description of Artificial Sequence: Synthetic oligonucleotide
aauaaagcagacccauucc

SEQ ID NO: 1502 - RNA, 19 nt, Artificial Sequence
  Description of Artificial Sequence: Synthetic oligonucleotide
auacccaucaacacuggua

SEQ ID NO: 1503 - RNA, 19 nt, Artificial Sequence
  Description of Artificial Sequence: Synthetic oligonucleotide
uggauuguucaucaauugg

SEQ ID NO: 1504 - RNA, 19 nt, Artificial Sequence
  Description of Artificial Sequence: Synthetic oligonucleotide
uggagaggucuaaagugga

SEQ ID NO: 1505 - RNA, 19 nt, Artificial Sequence
  Description of Artificial Sequence: Synthetic oligonucleotide
gucaucccuauaguucacu

SEQ ID NO: 1506 - RNA, 19 nt, Artificial Sequence
  Description of Artificial Sequence: Synthetic oligonucleotide
auaauggcuauaauuucuc

SEQ ID NO: 1507 - RNA, 19 nt, Artificial Sequence
  Description of Artificial Sequence: Synthetic oligonucleotide
aucccuuggcugguauaau

SEQ ID NO: 1508 - RNA, 19 nt, Artificial Sequence
  Description of Artificial Sequence: Synthetic oligonucleotide
gggcuauaauugcacuauc

SEQ ID NO: 1509 - RNA, 19 nt, Artificial Sequence
  Description of Artificial Sequence: Synthetic oligonucleotide
gauucucuuggagggcgua

SEQ ID NO: 1510 - RNA, 19 nt, Artificial Sequence
  Description of Artificial Sequence: Synthetic oligonucleotide
gcaucucucaaucuugagg

SEQ ID NO: 1511 - RNA, 19 nt, Artificial Sequence
  Description of Artificial Sequence: Synthetic oligonucleotide
cagcagaaaucuaaggaua

SEQ ID NO: 1512 - RNA, 19 nt, Artificial Sequence
  Description of Artificial Sequence: Synthetic oligonucleotide
gucaagagccaucuguaga

SEQ ID NO: 1513 - RNA, 19 nt, Artificial Sequence
  Description of Artificial Sequence: Synthetic oligonucleotide
aaacagaggcauuaacaca

SEQ ID NO: 1514 - RNA, 19 nt, Artificial Sequence
  Description of Artificial Sequence: Synthetic oligonucleotide
agcccagaucaaccuuuaa

SEQ ID NO: 1515 - RNA, 19 nt, Artificial Sequence
  Description of Artificial Sequence: Synthetic oligonucleotide
uauuuuugaucuggcaacc

SEQ ID NO: 1516 - RNA, 19 nt, Artificial Sequence
  Description of Artificial Sequence: Synthetic oligonucleotide
uguuuggagcaucuacuaa

SEQ ID NO: 1517 - RNA, 19 nt, Artificial Sequence
  Description of Artificial Sequence: Synthetic oligonucleotide
gaaauuacaguacacaaca

SEQ ID NO: 1518 - RNA, 19 nt, Artificial Sequence
  Description of Artificial Sequence: Synthetic oligonucleotide
acuugaccaguguaaaucu

SEQ ID NO: 1519 - RNA, 19 nt, Artificial Sequence
  Description of Artificial Sequence: Synthetic oligonucleotide
accaguguaaaucugaccu

SEQ ID NO: 1520 - RNA, 19 nt, Artificial Sequence
  Description of Artificial Sequence: Synthetic oligonucleotide
agaacaaucauuagcagca

SEQ ID NO: 1521 - RNA, 19 nt, Artificial Sequence
  Description of Artificial Sequence: Synthetic oligonucleotide
caauguggaaaccuaacug

SEQ ID NO: 1522 - RNA, 19 nt, Artificial Sequence
  Description of Artificial Sequence: Synthetic oligonucleotide
accaagaagguacaaaauu

SEQ ID NO: 1523 - RNA, 19 nt, Artificial Sequence
  Description of Artificial Sequence: Synthetic oligonucleotide
gguacaaaauugguugaag

SEQ ID NO: 1524 - RNA, 19 nt, Artificial Sequence
  Description of Artificial Sequence: Synthetic oligonucleotide
gguguggauuguucaucaa

SEQ ID NO: 1525 - RNA, 19 nt, Artificial Sequence
  Description of Artificial Sequence: Synthetic oligonucleotide
agaguucacaaaaagccca

SEQ ID NO: 1526 - RNA, 19 nt, Artificial Sequence
  Description of Artificial Sequence: Synthetic oligonucleotide
ugauagcuaaauuaaacca

SEQ ID NO: 1527 - RNA, 19 nt, Artificial Sequence
  Description of Artificial Sequence: Synthetic oligonucleotide
aauaagccugaagugaauc

SEQ ID NO: 1528 - RNA, 19 nt, Artificial Sequence
  Description of Artificial Sequence: Synthetic oligonucleotide
caguugaccaacacaaugc

SEQ ID NO: 1529 - RNA, 19 nt, Artificial Sequence
  Description of Artificial Sequence: Synthetic oligonucleotide
ugguguggauuguucauca

SEQ ID NO: 1530 - RNA, 19 nt, Artificial Sequence
  Description of Artificial Sequence: Synthetic oligonucleotide
auucacccugacagaguuc

SEQ ID NO: 1531 - RNA, 19 nt, Artificial Sequence
  Description of Artificial Sequence: Synthetic oligonucleotide
uaagaccuuauuugguaau

SEQ ID NO: 1532 - RNA, 19 nt, Artificial Sequence
  Description of Artificial Sequence: Synthetic oligonucleotide
aagcaauguggaaaccuaa

SEQ ID NO: 1533 - RNA, 19 nt, Artificial Sequence
  Description of Artificial Sequence: Synthetic oligonucleotide
ucugaaacuggauauccca

SEQ ID NO: 1534 - DNA, 21 bp, Artificial Sequence
  Description of Artificial Sequence: Synthetic oligonucleotide
  Description of Combined DNA/RNA Molecule: Synthetic oligonucleotide
ucgagaaucuaaacuaacutt

SEQ ID NO: 1535 - DNA, 21 bp, Artificial Sequence
  Description of Artificial Sequence: Synthetic oligonucleotide
  Description of Combined DNA/RNA Molecule: Synthetic oligonucleotide
aguuaguuuagauuccugatt

SEQ ID NO: 1536 - RNA, 21 nt, Artificial Sequence
  Description of Artificial Sequence: Synthetic oligonucleotide
gcacauaggagagaugagcuu

SEQ ID NO: 1537 - RNA, 23 nt, Artificial Sequence
  Description of Artificial Sequence: Synthetic oligonucleotide
aagcucaucucuccuaugugcug

SEQ ID NO: 1538 - RNA, 21 nt, Artificial Sequence
  Description of Artificial Sequence: Synthetic oligonucleotide
gcacauaggagagaugagcuu

SEQ ID NO: 1539 - RNA, 444 nt, Homo sapiens
augaacuuucugcugucuugggugcauuggagccuugccuugcugcucuaccuccaccaugccaaguggucccaggcugcacccauggcagaaggaggagggcagaaucaucacgaaguggugaaguucauggaugucuaucagcgcagcuacugccauccaaucgagacccugguggacaucuuccaggaguacccugaugagaucgaguacaucuucaagccauccugugugccccugaugcgaugcgggggcugcugcaaugacgagggccuggagugugugcccacugaggaguccaacaucaccaugcagauuaugcggaucaaaccucaccaaggccagcacauaggagagaugagcuuccuacagcacaacaaaugugaaugcagaccaaagaaagauagagcaagacaagaaaaaugugacaagccgaggcgguga

SEQ ID NO: 1540 - RNA, 23 nt, Artificial Sequence
  Description of Artificial Sequence: Synthetic oligonucleotide
augaacuuucugcugucuugggu

SEQ ID NO: 1541 - RNA, 23 nt, Artificial Sequence
  Description of Artificial Sequence: Synthetic oligonucleotide
ugaacuuucugcugucuugggug

SEQ ID NO: 1542 - RNA, 23 nt, Artificial Sequence
  Description of Artificial Sequence: Synthetic oligonucleotide
gaacuuucugcugucuugggugc

SEQ ID NO: 1543 - RNA, 23 nt, Artificial Sequence
  Description of Artificial Sequence: Synthetic oligonucleotide
aacuuucugcugucuugggugca

SEQ ID NO: 1544 - RNA, 23 nt, Artificial Sequence
  Description of Artificial Sequence: Synthetic oligonucleotide
acuuucugcugucuugggugcau

SEQ ID NO: 1545 - RNA, 23 nt, Artificial Sequence
  Description of Artificial Sequence: Synthetic oligonucleotide
cuuucugcugucuugggugcauu

SEQ ID NO: 1546 - RNA, 23 nt, Artificial Sequence
  Description of Artificial Sequence: Synthetic oligonucleotide
uuucugcugucuugggugcauug

SEQ ID NO: 1547 - RNA, 23 nt, Artificial Sequence
  Description of Artificial Sequence: Synthetic oligonucleotide
uucugcugucuugggugcauugg

SEQ ID NO: 1548 - RNA, 23 nt, Artificial Sequence
  Description of Artificial Sequence: Synthetic oligonucleotide
ucugcugucuugggugcauugga

SEQ ID NO: 1549 - RNA, 23 nt, Artificial Sequence
  Description of Artificial Sequence: Synthetic oligonucleotide
cugcugucuugggugcauuggag

SEQ ID NO: 1550 - RNA, 23 nt, Artificial Sequence
  Description of Artificial Sequence: Synthetic oligonucleotide
ugcugucuugggugcauuggagc

SEQ ID NO: 1551 - RNA, 23 nt, Artificial Sequence
  Description of Artificial Sequence: Synthetic oligonucleotide
gcugucuugggugcauuggagcc

SEQ ID NO: 1552 - RNA, 23 nt, Artificial Sequence
  Description of Artificial Sequence: Synthetic oligonucleotide
cugucuugggugcauuggagccu

SEQ ID NO: 1553 - RNA, 23 nt, Artificial Sequence
  Description of Artificial Sequence: Synthetic oligonucleotide
ugucuugggugcauuggagccuu

SEQ ID NO: 1554 - RNA, 23 nt, Artificial Sequence
  Description of Artificial Sequence: Synthetic oligonucleotide
gucuugggugcauuggagccuug

SEQ ID NO: 1555 - RNA, 23 nt, Artificial Sequence
  Description of Artificial Sequence: Synthetic oligonucleotide
ucuugggugcauuggagccuugc

SEQ ID NO: 1556 - RNA, 23 nt, Artificial Sequence
  Description of Artificial Sequence: Synthetic oligonucleotide
cuugggugcauuggagccuugcc

SEQ ID NO: 1557 - RNA, 23 nt, Artificial Sequence
  Description of Artificial Sequence: Synthetic oligonucleotide
uugggugcauuggagccuugccu

SEQ ID NO: 1558 - RNA, 23 nt, Artificial Sequence
  Description of Artificial Sequence: Synthetic oligonucleotide
ugggugcauuggagccuugccuu

SEQ ID NO: 1559 - RNA, 23 nt, Artificial Sequence
  Description of Artificial Sequence: Synthetic oligonucleotide
gggugcauuggagccuugccuug

SEQ ID NO: 1560 - RNA, 23 nt, Artificial Sequence
  Description of Artificial Sequence: Synthetic oligonucleotide
ggugcauuggagccuugccuugc

SEQ ID NO: 1561 - RNA, 23 nt, Artificial Sequence
  Description of Artificial Sequence: Synthetic oligonucleotide
gugcauuggagccuugccuugcu

SEQ ID NO: 1562 - RNA, 23 nt, Artificial Sequence
  Description of Artificial Sequence: Synthetic oligonucleotide
ugcauuggagccuugccuugcug

SEQ ID NO: 1563 - RNA, 23 nt, Artificial Sequence
  Description of Artificial Sequence: Synthetic oligonucleotide
gcauuggagccuugccuugcugc

SEQ ID NO: 1564 - RNA, 23 nt, Artificial Sequence
  Description of Artificial Sequence: Synthetic oligonucleotide
cauuggagccuugccuugcugcu

SEQ ID NO: 1565 - RNA, 23 nt, Artificial Sequence
  Description of Artificial Sequence: Synthetic oligonucleotide
auuggagccuugccuugcugcuc

SEQ ID NO: 1566 - RNA, 23 nt, Artificial Sequence
  Description of Artificial Sequence: Synthetic oligonucleotide
uuggagccuugccuugcugcucu

SEQ ID NO: 1567 - RNA, 23 nt, Artificial Sequence
  Description of Artificial Sequence: Synthetic oligonucleotide
uggagccuugccuugcugcucua

SEQ ID NO: 1568 - RNA, 23 nt, Artificial Sequence
  Description of Artificial Sequence: Synthetic oligonucleotide
ggagccuugccuugcugcucuac

SEQ ID NO: 1569 - RNA, 23 nt, Artificial Sequence
  Description of Artificial Sequence: Synthetic oligonucleotide
gagccuugccuugcugcucuacc

SEQ ID NO: 1570 - RNA, 23 nt, Artificial Sequence
  Description of Artificial Sequence: Synthetic oligonucleotide
agccuugccuugcugcucuaccu

SEQ ID NO: 1571 - RNA, 23 nt, Artificial Sequence
  Description of Artificial Sequence: Synthetic oligonucleotide
gccuugccuugcugcucuaccuc

SEQ ID NO: 1572 - RNA, 23 nt, Artificial Sequence
  Description of Artificial Sequence: Synthetic oligonucleotide
ccuugccuugcugcucuaccucc

SEQ ID NO: 1573 - RNA, 23 nt, Artificial Sequence
  Description of Artificial Sequence: Synthetic oligonucleotide
cuugccuugcugcucuaccucca

SEQ ID NO: 1574 - RNA, 23 nt, Artificial Sequence
  Description of Artificial Sequence: Synthetic oligonucleotide
uugccuugcugcucuaccuccac

SEQ ID NO: 1575 - RNA, 23 nt, Artificial Sequence
  Description of Artificial Sequence: Synthetic oligonucleotide
ugccuugcugcucuaccuccacc

SEQ ID NO: 1576 - RNA, 23 nt, Artificial Sequence
  Description of Artificial Sequence: Synthetic oligonucleotide
gccuugcugcucuaccuccacca

SEQ ID NO: 1577 - RNA, 23 nt, Artificial Sequence
  Description of Artificial Sequence: Synthetic oligonucleotide
ccuugcugcucuaccuccaccau

SEQ ID NO: 1578 - RNA, 23 nt, Artificial Sequence
  Description of Artificial Sequence: Synthetic oligonucleotide
cuugcugcucuaccuccaccaug

SEQ ID NO: 1579 - RNA, 23 nt, Artificial Sequence
  Description of Artificial Sequence: Synthetic oligonucleotide
uugcugcucuaccuccaccaugc

SEQ ID NO: 1580 - RNA, 23 nt, Artificial Sequence
  Description of Artificial Sequence: Synthetic oligonucleotide
ugcugcucuaccuccaccaugcc

SEQ ID NO: 1581 - RNA, 23 nt, Artificial Sequence
  Description of Artificial Sequence: Synthetic oligonucleotide
gcugcucuaccuccaccaugcca

SEQ ID NO: 1582 - RNA, 23 nt, Artificial Sequence
  Description of Artificial Sequence: Synthetic oligonucleotide
cugcucuaccuccaccaugccaa

SEQ ID NO: 1583 - RNA, 23 nt, Artificial Sequence
  Description of Artificial Sequence: Synthetic oligonucleotide
ugcucuaccuccaccaugccaag

SEQ ID NO: 1584 - RNA, 23 nt, Artificial Sequence
  Description of Artificial Sequence: Synthetic oligonucleotide
gcucuaccuccaccaugccaagu

SEQ ID NO: 1585 - RNA, 23 nt, Artificial Sequence
  Description of Artificial Sequence: Synthetic oligonucleotide
cucuaccuccaccaugccaagug

SEQ ID NO: 1586 - RNA, 23 nt, Artificial Sequence
  Description of Artificial Sequence: Synthetic oligonucleotide
ucuaccuccaccaugccaagugg

SEQ ID NO: 1587 - RNA, 23 nt, Artificial Sequence
  Description of Artificial Sequence: Synthetic oligonucleotide
cuaccuccaccaugccaaguggu

SEQ ID NO: 1588 - RNA, 23 nt, Artificial Sequence
  Description of Artificial Sequence: Synthetic oligonucleotide
uaccuccaccaugccaagugguc

SEQ ID NO: 1589 - RNA, 23 nt, Artificial Sequence
  Description of Artificial Sequence: Synthetic oligonucleotide
accuccaccaugccaaguggucc

SEQ ID NO: 1590 - RNA, 23 nt, Artificial Sequence
  Description of Artificial Sequence: Synthetic oligonucleotide
ccuccaccaugccaagugguccc

SEQ ID NO: 1591 - RNA, 23 nt, Artificial Sequence
  Description of Artificial Sequence: Synthetic oligonucleotide
cuccaccaugccaagugguccca

SEQ ID NO: 1592 - RNA, 23 nt, Artificial Sequence
  Description of Artificial Sequence: Synthetic oligonucleotide
uccaccaugccaaguggucccag

SEQ ID NO: 1593 - RNA, 23 nt, Artificial Sequence
  Description of Artificial Sequence: Synthetic oligonucleotide
ccaccaugccaaguggucccagg

SEQ ID NO: 1594 - RNA, 23 nt, Artificial Sequence
  Description of Artificial Sequence: Synthetic oligonucleotide
caccaugccaaguggucccaggc

SEQ ID NO: 1595 - RNA, 23 nt, Artificial Sequence
  Description of Artificial Sequence: Synthetic oligonucleotide
accaugccaaguggucccaggcu

SEQ ID NO: 1596 - RNA, 23 nt, Artificial Sequence
  Description of Artificial Sequence: Synthetic oligonucleotide
ccaugccaaguggucccaggcug

SEQ ID NO: 1597 - RNA, 23 nt, Artificial Sequence
  Description of Artificial Sequence: Synthetic oligonucleotide
caugccaaguggucccaggcugc

SEQ ID NO: 1598 - RNA, 23 nt, Artificial Sequence
  Description of Artificial Sequence: Synthetic oligonucleotide
augccaaguggucccaggcugca

SEQ ID NO: 1599 - RNA, 23 nt, Artificial Sequence
  Description of Artificial Sequence: Synthetic oligonucleotide
ugccaaguggucccaggcugcac

SEQ ID NO: 1600 - RNA, 23 nt, Artificial Sequence
  Description of Artificial Sequence: Synthetic oligonucleotide
gccaaguggucccaggcugcacc

SEQ ID NO: 1601 - RNA, 23 nt, Artificial Sequence
  Description of Artificial Sequence: Synthetic oligonucleotide
ccaaguggucccaggcugcaccc

SEQ ID NO: 1602 - RNA, 23 nt, Artificial Sequence
  Description of Artificial Sequence: Synthetic oligonucleotide
caaguggucccaggcugcaccca

SEQ ID NO: 1603 - RNA, 23 nt, Artificial Sequence
  Description of Artificial Sequence: Synthetic oligonucleotide
aaguggucccaggcugcacccau

SEQ ID NO: 1604 - RNA, 23 nt, Artificial Sequence
  Description of Artificial Sequence: Synthetic oligonucleotide
aguggucccaggcugcacccaug

SEQ ID NO: 1605 - RNA, 23 nt, Artificial Sequence
  Description of Artificial Sequence: Synthetic oligonucleotide
guggucccaggcugcacccaugg

SEQ ID NO: 1606 - RNA, 23 nt, Artificial Sequence
  Description of Artificial Sequence: Synthetic oligonucleotide
uggucccaggcugcacccauggc

SEQ ID NO: 1607 - RNA, 23 nt, Artificial Sequence
  Description of Artificial Sequence: Synthetic oligonucleotide
ggucccaggcugcacccauggca

SEQ ID NO: 1608 - RNA, 23 nt, Artificial Sequence
  Description of Artificial Sequence: Synthetic oligonucleotide
gucccaggcugcacccauggcag

SEQ ID NO: 1609 - RNA, 23 nt, Artificial Sequence
  Description of Artificial Sequence: Synthetic oligonucleotide
ucccaggcugcacccauggcaga

SEQ ID NO: 1610 - RNA, 23 nt, Artificial Sequence
  Description of Artificial Sequence: Synthetic oligonucleotide
cccaggcugcacccauggcagaa

SEQ ID NO: 1611 - RNA, 23 nt, Artificial Sequence
  Description of Artificial Sequence: Synthetic oligonucleotide
ccaggcugcacccauggcagaag

SEQ ID NO: 1612 - RNA, 23 nt, Artificial Sequence
  Description of Artificial Sequence: Synthetic oligonucleotide
caggcugcacccauggcagaagg

SEQ ID NO: 1613 - RNA, 23 nt, Artificial Sequence
  Description of Artificial Sequence: Synthetic oligonucleotide
aggcugcacccauggcagaagga

SEQ ID NO: 1614 - RNA, 23 nt, Artificial Sequence
  Description of Artificial Sequence: Synthetic oligonucleotide
ggcugcacccauggcagaaggag

SEQ ID NO: 1615 - RNA, 23 nt, Artificial Sequence
  Description of Artificial Sequence: Synthetic oligonucleotide
gcugcacccauggcagaaggagg

SEQ ID NO: 1616 - RNA, 23 nt, Artificial Sequence
  Description of Artificial Sequence: Synthetic oligonucleotide
cugcacccauggcagaaggagga

SEQ ID NO: 1617 - RNA, 23 nt, Artificial Sequence
  Description of Artificial Sequence: Synthetic oligonucleotide
ugcacccauggcagaaggaggag

SEQ ID NO: 1618 - RNA, 23 nt, Artificial Sequence
  Description of Artificial Sequence: Synthetic oligonucleotide
gcacccauggcagaaggaggagg

SEQ ID NO: 1619 - RNA, 23 nt, Artificial Sequence
  Description of Artificial Sequence: Synthetic oligonucleotide
cacccauggcagaaggaggaggg

SEQ ID NO: 1620 - RNA, 23 nt, Artificial Sequence
  Description of Artificial Sequence: Synthetic oligonucleotide
acccauggcagaaggaggagggc

SEQ ID NO: 1621 - RNA, 23 nt, Artificial Sequence
  Description of Artificial Sequence: Synthetic oligonucleotide
cccauggcagaaggaggagggca

SEQ ID NO: 1622 - RNA, 23 nt, Artificial Sequence
  Description of Artificial Sequence: Synthetic oligonucleotide
ccauggcagaaggaggagggcag

SEQ ID NO: 1623 - RNA, 23 nt, Artificial Sequence
  Description of Artificial Sequence: Synthetic oligonucleotide
cauggcagaaggaggagggcaga

SEQ ID NO: 1624 - RNA, 23 nt, Artificial Sequence
  Description of Artificial Sequence: Synthetic oligonucleotide
auggcagaaggaggagggcagaa

SEQ ID NO: 1625 - RNA, 23 nt, Artificial Sequence
  Description of Artificial Sequence: Synthetic oligonucleotide
uggcagaaggaggagggcagaau

SEQ ID NO: 1626 - RNA, 23 nt, Artificial Sequence
  Description of Artificial Sequence: Synthetic oligonucleotide
ggcagaaggaggagggcagaauc

SEQ ID NO: 1627 - RNA, 23 nt, Artificial Sequence
  Description of Artificial Sequence: Synthetic oligonucleotide
gcagaaggaggagggcagaauca

SEQ ID NO: 1628 - RNA, 23 nt, Artificial Sequence
  Description of Artificial Sequence: Synthetic oligonucleotide
cagaaggaggagggcagaaucau

SEQ ID NO: 1629 - RNA, 23 nt, Artificial Sequence
  Description of Artificial Sequence: Synthetic oligonucleotide
agaaggaggagggcagaaucauc

SEQ ID NO: 1630 - RNA, 23 nt, Artificial Sequence
  Description of Artificial Sequence: Synthetic oligonucleotide
gaaggaggagggcagaaucauca

SEQ ID NO: 1631 - RNA, 23 nt, Artificial Sequence
  Description of Artificial Sequence: Synthetic oligonucleotide
aaggaggagggcagaaucaucac

SEQ ID NO: 1632 - RNA, 23 nt, Artificial Sequence
  Description of Artificial Sequence: Synthetic oligonucleotide
aggaggagggcagaaucaucacg

SEQ ID NO: 1633 - RNA, 23 nt, Artificial Sequence
  Description of Artificial Sequence: Synthetic oligonucleotide
ggaggagggcagaaucaucacga

SEQ ID NO: 1634 - RNA, 23 nt, Artificial Sequence
  Description of Artificial Sequence: Synthetic oligonucleotide
gaggagggcagaaucaucacgaa

SEQ ID NO: 1635 - RNA, 23 nt, Artificial Sequence
  Description of Artificial Sequence: Synthetic oligonucleotide
aggagggcagaaucaucacgaag

SEQ ID NO: 1636 - RNA, 23 nt, Artificial Sequence
  Description of Artificial Sequence: Synthetic oligonucleotide
ggagggcagaaucaucacgaagu

SEQ ID NO: 1637 - RNA, 23 nt, Artificial Sequence
  Description of Artificial Sequence: Synthetic oligonucleotide
gagggcagaaucaucacgaagug

SEQ ID NO: 1638 - RNA, 23 nt, Artificial Sequence
  Description of Artificial Sequence: Synthetic oligonucleotide
agggcagaaucaucacgaagugg

SEQ ID NO: 1639 - RNA, 23 nt, Artificial Sequence
  Description of Artificial Sequence: Synthetic oligonucleotide
gggcagaaucaucacgaaguggu

SEQ ID NO: 1640 - RNA, 23 nt, Artificial Sequence
  Description of Artificial Sequence: Synthetic oligonucleotide
ggcagaaucaucacgaaguggug

SEQ ID NO: 1641 - RNA, 23 nt, Artificial Sequence
  Description of Artificial Sequence: Synthetic oligonucleotide
gcagaaucaucacgaagugguga

SEQ ID NO: 1642 - RNA, 23 nt, Artificial Sequence
  Description of Artificial Sequence: Synthetic oligonucleotide
cagaaucaucacgaaguggugaa

SEQ ID NO: 1643 - RNA, 23 nt, Artificial Sequence
  Description of Artificial Sequence: Synthetic oligonucleotide
agaaucaucacgaaguggugaag

SEQ ID NO: 1644 - RNA, 23 nt, Artificial Sequence
  Description of Artificial Sequence: Synthetic oligonucleotide
gaaucaucacgaaguggugaagu

SEQ ID NO: 1645 - RNA, 23 nt, Artificial Sequence
  Description of Artificial Sequence: Synthetic oligonucleotide
aaucaucacgaaguggugaaguu

SEQ ID NO: 1646 - RNA, 23 nt, Artificial Sequence
  Description of Artificial Sequence: Synthetic oligonucleotide
aucaucacgaaguggugaaguuc

SEQ ID NO: 1647 - RNA, 23 nt, Artificial Sequence
  Description of Artificial Sequence: Synthetic oligonucleotide
ucaucacgaaguggugaaguuca

SEQ ID NO: 1648 - RNA, 23 nt, Artificial Sequence
  Description of Artificial Sequence: Synthetic oligonucleotide
caucacgaaguggugaaguucau

SEQ ID NO: 1649 - RNA, 23 nt, Artificial Sequence
  Description of Artificial Sequence: Synthetic oligonucleotide
aucacgaaguggugaaguucaug

SEQ ID NO: 1650 - RNA, 23 nt, Artificial Sequence
  Description of Artificial Sequence: Synthetic oligonucleotide
ucacgaaguggugaaguucaugg

SEQ ID NO: 1651 - RNA, 23 nt, Artificial Sequence
  Description of Artificial Sequence: Synthetic oligonucleotide
cacgaaguggugaaguucaugga

SEQ ID NO: 1652 - RNA, 23 nt, Artificial Sequence
  Description of Artificial Sequence: Synthetic oligonucleotide
acgaaguggugaaguucauggau

SEQ ID NO: 1653 - RNA, 23 nt, Artificial Sequence
  Description of Artificial Sequence: Synthetic oligonucleotide
cgaaguggugaaguucauggaug

SEQ ID NO: 1654 - RNA, 23 nt, Artificial Sequence
  Description of Artificial Sequence: Synthetic oligonucleotide
gaaguggugaaguucauggaugu

SEQ ID NO: 1655 - RNA, 23 nt, Artificial Sequence
  Description of Artificial Sequence: Synthetic oligonucleotide
aaguggugaaguucauggauguc

SEQ ID NO: 1656 - RNA, 23 nt, Artificial Sequence
  Description of Artificial Sequence: Synthetic oligonucleotide
aguggugaaguucauggaugucu

SEQ ID NO: 1657 - RNA, 23 nt, Artificial Sequence
  Description of Artificial Sequence: Synthetic oligonucleotide
guggugaaguucauggaugucua

SEQ ID NO: 1658 - RNA, 23 nt, Artificial Sequence
  Description of Artificial Sequence: Synthetic oligonucleotide
uggugaaguucauggaugucuau

SEQ ID NO: 1659 - RNA, 23 nt, Artificial Sequence
  Description of Artificial Sequence: Synthetic oligonucleotide
ggugaaguucauggaugucuauc

SEQ ID NO: 1660 - RNA, 23 nt, Artificial Sequence
  Description of Artificial Sequence: Synthetic oligonucleotide
gugaaguucauggaugucuauca

SEQ ID NO: 1661 - RNA, 23 nt, Artificial Sequence
  Description of Artificial Sequence: Synthetic oligonucleotide
ugaaguucauggaugucuaucag

SEQ ID NO: 1662 - RNA, 23 nt, Artificial Sequence
  Description of Artificial Sequence: Synthetic oligonucleotide
gaaguucauggaugucuaucagc

SEQ ID NO: 1663 - RNA, 23 nt, Artificial Sequence
  Description of Artificial Sequence: Synthetic oligonucleotide
aaguucauggaugucuaucagcg

SEQ ID NO: 1664 - RNA, 23 nt, Artificial Sequence
  Description of Artificial Sequence: Synthetic oligonucleotide
aguucauggaugucuaucagcgc

SEQ ID NO: 1665 - RNA, 23 nt, Artificial Sequence
  Description of Artificial Sequence: Synthetic oligonucleotide
guucauggaugucuaucagcgca

SEQ ID NO: 1666 - RNA, 23 nt, Artificial Sequence
  Description of Artificial Sequence: Synthetic oligonucleotide
uucauggaugucuaucagcgcag

SEQ ID NO: 1667 - RNA, 23 nt, Artificial Sequence
  Description of Artificial Sequence: Synthetic oligonucleotide
ucauggaugucuaucagcgcagc

SEQ ID NO: 1668 - RNA, 23 nt, Artificial Sequence
  Description of Artificial Sequence: Synthetic oligonucleotide
cauggaugucuaucagcgcagcu

SEQ ID NO: 1669 - RNA, 23 nt, Artificial Sequence
  Description of Artificial Sequence: Synthetic oligonucleotide
auggaugucuaucagcgcagcua

SEQ ID NO: 1670 - RNA, 23 nt, Artificial Sequence
  Description of Artificial Sequence: Synthetic oligonucleotide
uggaugucuaucagcgcagcuac

SEQ ID NO: 1671 - RNA, 23 nt, Artificial Sequence
  Description of Artificial Sequence: Synthetic oligonucleotide
ggaugucuaucagcgcagcuacu

SEQ ID NO: 1672 - RNA, 23 nt, Artificial Sequence
  Description of Artificial Sequence: Synthetic oligonucleotide
gaugucuaucagcgcagcuacug

SEQ ID NO: 1673 - RNA, 23 nt, Artificial Sequence
  Description of Artificial Sequence: Synthetic oligonucleotide
augucuaucagcgcagcuacugc

SEQ ID NO: 1674 - RNA, 23 nt, Artificial Sequence
  Description of Artificial Sequence: Synthetic oligonucleotide
ugucuaucagcgcagcuacugcc

SEQ ID NO: 1675 - RNA, 23 nt, Artificial Sequence
  Description of Artificial Sequence: Synthetic oligonucleotide
gucuaucagcgcagcuacugcca

SEQ ID NO: 1676 - RNA, 23 nt, Artificial Sequence
  Description of Artificial Sequence: Synthetic oligonucleotide
ucuaucagcgcagcuacugccau

SEQ ID NO: 1677 - RNA, 23 nt, Artificial Sequence
  Description of Artificial Sequence: Synthetic oligonucleotide
cuaucagcgcagcuacugccauc

SEQ ID NO: 1678 - RNA, 23 nt, Artificial Sequence
  Description of Artificial Sequence: Synthetic oligonucleotide
uaucagcgcagcuacugccaucc

SEQ ID NO: 1679 - RNA, 23 nt, Artificial Sequence
  Description of Artificial Sequence: Synthetic oligonucleotide
aucagcgcagcuacugccaucca

SEQ ID NO: 1680 - RNA, 23 nt, Artificial Sequence
  Description of Artificial Sequence: Synthetic oligonucleotide
ucagcgcagcuacugccauccaa

SEQ ID NO: 1681 - RNA, 23 nt, Artificial Sequence
  Description of Artificial Sequence: Synthetic oligonucleotide
cagcgcagcuacugccauccaau

SEQ ID NO: 1682 - RNA, 23 nt, Artificial Sequence
  Description of Artificial Sequence: Synthetic oligonucleotide
agcgcagcuacugccauccaauc

SEQ ID NO: 1683 - RNA, 23 nt, Artificial Sequence
  Description of Artificial Sequence: Synthetic oligonucleotide
gcgcagcuacugccauccaaucg

SEQ ID NO: 1684 - RNA, 23 nt, Artificial Sequence
  Description of Artificial Sequence: Synthetic oligonucleotide
cgcagcuacugccauccaaucga

SEQ ID NO: 1685 - RNA, 23 nt, Artificial Sequence
  Description of Artificial Sequence: Synthetic oligonucleotide
gcagcuacugccauccaaucgag

SEQ ID NO: 1686 - RNA, 23 nt, Artificial Sequence
  Description of Artificial Sequence: Synthetic oligonucleotide
cagcuacugccauccaaucgaga

SEQ ID NO: 1687 - RNA, 23 nt, Artificial Sequence
  Description of Artificial Sequence: Synthetic oligonucleotide
agcuacugccauccaaucgagac

SEQ ID NO: 1688 - RNA, 23 nt, Artificial Sequence
  Description of Artificial Sequence: Synthetic oligonucleotide
gcuacugccauccaaucgagacc

SEQ ID NO: 1689 - RNA, 23 nt, Artificial Sequence
  Description of Artificial Sequence: Synthetic oligonucleotide
cuacugccauccaaucgagaccc

SEQ ID NO: 1690 - RNA, 23 nt, Artificial Sequence
  Description of Artificial Sequence: Synthetic oligonucleotide
uacugccauccaaucgagacccu

SEQ ID NO: 1691 - RNA, 23 nt, Artificial Sequence
  Description of Artificial Sequence: Synthetic oligonucleotide
acugccauccaaucgagacccug

SEQ ID NO: 1692 - RNA, 23 nt, Artificial Sequence
  Description of Artificial Sequence: Synthetic oligonucleotide
cugccauccaaucgagacccugg

SEQ ID NO: 1693 - RNA, 23 nt, Artificial Sequence
  Description of Artificial Sequence: Synthetic oligonucleotide
ugccauccaaucgagacccuggu

SEQ ID NO: 1694 - RNA, 23 nt, Artificial Sequence
  Description of Artificial Sequence: Synthetic oligonucleotide
gccauccaaucgagacccuggug

SEQ ID NO: 1695 - RNA, 23 nt, Artificial Sequence
  Description of Artificial Sequence: Synthetic oligonucleotide
ccauccaaucgagacccuggugg

SEQ ID NO: 1696 - RNA, 23 nt, Artificial Sequence
  Description of Artificial Sequence: Synthetic oligonucleotide
cauccaaucgagacccuggugga

SEQ ID NO: 1697 - RNA, 23 nt, Artificial Sequence
  Description of Artificial Sequence: Synthetic oligonucleotide
auccaaucgagacccugguggac

SEQ ID NO: 1698 - RNA, 23 nt, Artificial Sequence
  Description of Artificial Sequence: Synthetic oligonucleotide
uccaaucgagacccugguggaca

SEQ ID NO: 1699 - RNA, 23 nt, Artificial Sequence
  Description of Artificial Sequence: Synthetic oligonucleotide
ccaaucgagacccugguggacau

SEQ ID NO: 1700 - RNA, 23 nt, Artificial Sequence
  Description of Artificial Sequence: Synthetic oligonucleotide
caaucgagacccugguggacauc

SEQ ID NO: 1701 - RNA, 23 nt, Artificial Sequence
  Description of Artificial Sequence: Synthetic oligonucleotide
aaucgagacccugguggacaucu

SEQ ID NO: 1702 - RNA, 23 nt, Artificial Sequence
  Description of Artificial Sequence: Synthetic oligonucleotide
aucgagacccugguggacaucuu

SEQ ID NO: 1703 - RNA, 23 nt, Artificial Sequence
  Description of Artificial Sequence: Synthetic oligonucleotide
ucgagacccugguggacaucuuc

SEQ ID NO: 1704 - RNA, 23 nt, Artificial Sequence
  Description of Artificial Sequence: Synthetic oligonucleotide
cgagacccugguggacaucuucc

SEQ ID NO: 1705 - RNA, 23 nt, Artificial Sequence
  Description of Artificial Sequence: Synthetic oligonucleotide
gagacccugguggacaucuucca

SEQ ID NO: 1706 - RNA, 23 nt, Artificial Sequence
  Description of Artificial Sequence: Synthetic oligonucleotide
agacccugguggacaucuuccag

SEQ ID NO: 1707 - RNA, 23 nt, Artificial Sequence
  Description of Artificial Sequence: Synthetic oligonucleotide
gacccugguggacaucuuccagg

SEQ ID NO: 1708 - RNA, 23 nt, Artificial Sequence
  Description of Artificial Sequence: Synthetic oligonucleotide
acccugguggacaucuuccagga

SEQ ID NO: 1709 - RNA, 23 nt, Artificial Sequence
  Description of Artificial Sequence: Synthetic oligonucleotide
cccugguggacaucuuccaggag

SEQ ID NO: 1710 - RNA, 23 nt, Artificial Sequence
  Description of Artificial Sequence: Synthetic oligonucleotide
ccugguggacaucuuccaggagu

SEQ ID NO: 1711 - RNA, 23 nt, Artificial Sequence
  Description of Artificial Sequence: Synthetic oligonucleotide
cugguggacaucuuccaggagua

SEQ ID NO: 1712 - RNA, 23 nt, Artificial Sequence
  Description of Artificial Sequence: Synthetic oligonucleotide
ugguggacaucuuccaggaguac

SEQ ID NO: 1713 - RNA, 23 nt, Artificial Sequence
  Description of Artificial Sequence: Synthetic oligonucleotide
gguggacaucuuccaggaguacc

SEQ ID NO: 1714 - RNA, 23 nt, Artificial Sequence
  Description of Artificial Sequence: Synthetic oligonucleotide
guggacaucuuccaggaguaccc

SEQ ID NO: 1715 - RNA, 23 nt, Artificial Sequence
  Description of Artificial Sequence: Synthetic oligonucleotide
uggacaucuuccaggaguacccu

SEQ ID NO: 1716 - RNA, 23 nt, Artificial Sequence
  Description of Artificial Sequence: Synthetic oligonucleotide
ggacaucuuccaggaguacccug

SEQ ID NO: 1717 - RNA, 23 nt, Artificial Sequence
  Description of Artificial Sequence: Synthetic oligonucleotide
gacaucuuccaggaguacccuga

SEQ ID NO: 1718 - RNA, 23 nt, Artificial Sequence
  Description of Artificial Sequence: Synthetic oligonucleotide
acaucuuccaggaguacccugau

SEQ ID NO: 1719 - RNA, 23 nt, Artificial Sequence
  Description of Artificial Sequence: Synthetic oligonucleotide
caucuuccaggaguacccugaug

SEQ ID NO: 1720 - RNA, 23 nt, Artificial Sequence
  Description of Artificial Sequence: Synthetic oligonucleotide
aucuuccaggaguacccugauga

SEQ ID NO: 1721 - RNA, 23 nt, Artificial Sequence
  Description of Artificial Sequence: Synthetic oligonucleotide
ucuuccaggaguacccugaugag

SEQ ID NO: 1722 - RNA, 23 nt, Artificial Sequence
  Description of Artificial Sequence: Synthetic oligonucleotide
cuuccaggaguacccugaugaga

SEQ ID NO: 1723 - RNA, 23 nt, Artificial Sequence
  Description of Artificial Sequence: Synthetic oligonucleotide
uuccaggaguacccugaugagau

SEQ ID NO: 1724 - RNA, 23 nt, Artificial Sequence
  Description of Artificial Sequence: Synthetic oligonucleotide
uccaggaguacccugaugagauc

SEQ ID NO: 1725 - RNA, 23 nt, Artificial Sequence
  Description of Artificial Sequence: Synthetic oligonucleotide
ccaggaguacccugaugagaucg

SEQ ID NO: 1726 - RNA, 23 nt, Artificial Sequence
  Description of Artificial Sequence: Synthetic oligonucleotide
caggaguacccugaugagaucga

SEQ ID NO: 1727 - RNA, 23 nt, Artificial Sequence
  Description of Artificial Sequence: Synthetic oligonucleotide
aggaguacccugaugagaucgag

SEQ ID NO: 1728 - RNA, 23 nt, Artificial Sequence
  Description of Artificial Sequence: Synthetic oligonucleotide
ggaguacccugaugagaucgagu

SEQ ID NO: 1729 - RNA, 23 nt, Artificial Sequence
  Description of Artificial Sequence: Synthetic oligonucleotide
gaguacccugaugagaucgagua

SEQ ID NO: 1730 - RNA, 23 nt, Artificial Sequence
  Description of Artificial Sequence: Synthetic oligonucleotide
aguacccugaugagaucgaguac

SEQ ID NO: 1731 - RNA, 23 nt, Artificial Sequence
  Description of Artificial Sequence: Synthetic oligonucleotide
guacccugaugagaucgaguaca

SEQ ID NO: 1732 - RNA, 23 nt, Artificial Sequence
  Description of Artificial Sequence: Synthetic oligonucleotide
uacccugaugagaucgaguacau

SEQ ID NO: 1733 - RNA, 23 nt, Artificial Sequence
  Description of Artificial Sequence: Synthetic oligonucleotide
acccugaugagaucgaguacauc

SEQ ID NO: 1734 - RNA, 23 nt, Artificial Sequence
  Description of Artificial Sequence: Synthetic oligonucleotide
cccugaugagaucgaguacaucu

SEQ ID NO: 1735 - RNA, 23 nt, Artificial Sequence
  Description of Artificial Sequence: Synthetic oligonucleotide
ccugaugagaucgaguacaucuu

SEQ ID NO: 1736 - RNA, 23 nt, Artificial Sequence
  Description of Artificial Sequence: Synthetic oligonucleotide
cugaugagaucgaguacaucuuc

SEQ ID NO: 1737 - RNA, 23 nt, Artificial Sequence
  Description of Artificial Sequence: Synthetic oligonucleotide
ugaugagaucgaguacaucuuca

SEQ ID NO: 1738 - RNA, 23 nt, Artificial Sequence
  Description of Artificial Sequence: Synthetic oligonucleotide
gaugagaucgaguacaucuucaa

SEQ ID NO: 1739 - RNA, 23 nt, Artificial Sequence
  Description of Artificial Sequence: Synthetic oligonucleotide
augagaucgaguacaucuucaag

SEQ ID NO: 1740 - RNA, 23 nt, Artificial Sequence
  Description of Artificial Sequence: Synthetic oligonucleotide
ugagaucgaguacaucuucaagc

SEQ ID NO: 1741 - RNA, 23 nt, Artificial Sequence
  Description of Artificial Sequence: Synthetic oligonucleotide
gagaucgaguacaucuucaagcc

SEQ ID NO: 1742 - RNA, 23 nt, Artificial Sequence
  Description of Artificial Sequence: Synthetic oligonucleotide
agaucgaguacaucuucaagcca

SEQ ID NO: 1743 - RNA, 23 nt, Artificial Sequence
  Description of Artificial Sequence: Synthetic oligonucleotide
gaucgaguacaucuucaagccau

SEQ ID NO: 1744 - RNA, 23 nt, Artificial Sequence
  Description of Artificial Sequence: Synthetic oligonucleotide
aucgaguacaucuucaagccauc

SEQ ID NO: 1745 - RNA, 23 nt, Artificial Sequence
  Description of Artificial Sequence: Synthetic oligonucleotide
ucgaguacaucuucaagccaucc

SEQ ID NO: 1746 - RNA, 23 nt, Artificial Sequence
  Description of Artificial Sequence: Synthetic oligonucleotide
cgaguacaucuucaagccauccu

SEQ ID NO: 1747 - RNA, 23 nt, Artificial Sequence
  Description of Artificial Sequence: Synthetic oligonucleotide
gaguacaucuucaagccauccug

SEQ ID NO: 1748 - RNA, 23 nt, Artificial Sequence
  Description of Artificial Sequence: Synthetic oligonucleotide
aguacaucuucaagccauccugu

SEQ ID NO: 1749 - RNA, 23 nt, Artificial Sequence
  Description of Artificial Sequence: Synthetic oligonucleotide
guacaucuucaagccauccugug

SEQ ID NO: 1750 - RNA, 23 nt, Artificial Sequence
  Description of Artificial Sequence: Synthetic oligonucleotide
uacaucuucaagccauccugugu

SEQ ID NO: 1751 - RNA, 23 nt, Artificial Sequence
  Description of Artificial Sequence: Synthetic oligonucleotide
acaucuucaagccauccugugug

SEQ ID NO: 1752 - RNA, 23 nt, Artificial Sequence
  Description of Artificial Sequence: Synthetic oligonucleotide
caucuucaagccauccugugugc

SEQ ID NO: 1753 - RNA, 23 nt, Artificial Sequence
  Description of Artificial Sequence: Synthetic oligonucleotide
aucuucaagccauccugugugcc

SEQ ID NO: 1754 - RNA, 23 nt, Artificial Sequence
  Description of Artificial Sequence: Synthetic oligonucleotide
ucuucaagccauccugugugccc

SEQ ID NO: 1755 - RNA, 23 nt, Artificial Sequence
  Description of Artificial Sequence: Synthetic oligonucleotide
cuucaagccauccugugugcccc

SEQ ID NO: 1756 - RNA, 23 nt, Artificial Sequence
  Description of Artificial Sequence: Synthetic oligonucleotide
uucaagccauccugugugccccu

SEQ ID NO: 1757 - RNA, 23 nt, Artificial Sequence
  Description of Artificial Sequence: Synthetic oligonucleotide
ucaagccauccugugugccccug

SEQ ID NO: 1758 - RNA, 23 nt, Artificial Sequence
  Description of Artificial Sequence: Synthetic oligonucleotide
caagccauccugugugccccuga

SEQ ID NO: 1759 - RNA, 23 nt, Artificial Sequence
  Description of Artificial Sequence: Synthetic oligonucleotide
aagccauccugugugccccugau

SEQ ID NO: 1760 - RNA, 23 nt, Artificial Sequence
  Description of Artificial Sequence: Synthetic oligonucleotide
agccauccugugugccccugaug

SEQ ID NO: 1761 - RNA, 23 nt, Artificial Sequence
  Description of Artificial Sequence: Synthetic oligonucleotide
gccauccugugugccccugaugc

SEQ ID NO: 1762 - RNA, 23 nt, Artificial Sequence
  Description of Artificial Sequence: Synthetic oligonucleotide
ccauccugugugccccugaugcg

SEQ ID NO: 1763 - RNA, 23 nt, Artificial Sequence
  Description of Artificial Sequence: Synthetic oligonucleotide
cauccugugugccccugaugcga

SEQ ID NO: 1764 - RNA, 23 nt, Artificial Sequence
  Description of Artificial Sequence: Synthetic oligonucleotide
auccugugugccccugaugcgau

SEQ ID NO: 1765 - RNA, 23 nt, Artificial Sequence
  Description of Artificial Sequence: Synthetic oligonucleotide
uccugugugccccugaugcgaug

SEQ ID NO: 1766 - RNA, 23 nt, Artificial Sequence
  Description of Artificial Sequence: Synthetic oligonucleotide
ccugugugccccugaugcgaugc

SEQ ID NO: 1767 - RNA, 23 nt, Artificial Sequence
  Description of Artificial Sequence: Synthetic oligonucleotide
cugugugccccugaugcgaugcg

SEQ ID NO: 1768 - RNA, 23 nt, Artificial Sequence
  Description of Artificial Sequence: Synthetic oligonucleotide
ugugugccccugaugcgaugcgg

SEQ ID NO: 1769 - RNA, 23 nt, Artificial Sequence
  Description of Artificial Sequence: Synthetic oligonucleotide
gugugccccugaugcgaugcggg

SEQ ID NO: 1770 - RNA, 23 nt, Artificial Sequence
  Description of Artificial Sequence: Synthetic oligonucleotide
ugugccccugaugcgaugcgggg

SEQ ID NO: 1771 - RNA, 23 nt, Artificial Sequence
  Description of Artificial Sequence: Synthetic oligonucleotide
gugccccugaugcgaugcggggg

SEQ ID NO: 1772 - RNA, 23 nt, Artificial Sequence
  Description of Artificial Sequence: Synthetic oligonucleotide
ugccccugaugcgaugcgggggc

SEQ ID NO: 1773 - RNA, 23 nt, Artificial Sequence
  Description of Artificial Sequence: Synthetic oligonucleotide
gccccugaugcgaugcgggggcu

SEQ ID NO: 1774 - RNA, 23 nt, Artificial Sequence
  Description of Artificial Sequence: Synthetic oligonucleotide
ccccugaugcgaugcgggggcug

SEQ ID NO: 1775 - RNA, 23 nt, Artificial Sequence
  Description of Artificial Sequence: Synthetic oligonucleotide
cccugaugcgaugcgggggcugc

SEQ ID NO: 1776 - RNA, 23 nt, Artificial Sequence
  Description of Artificial Sequence: Synthetic oligonucleotide
ccugaugcgaugcgggggcugcu

SEQ ID NO: 1777 - RNA, 23 nt, Artificial Sequence
  Description of Artificial Sequence: Synthetic oligonucleotide
cugaugcgaugcgggggcugcug

SEQ ID NO: 1778 - RNA, 23 nt, Artificial Sequence
  Description of Artificial Sequence: Synthetic oligonucleotide
ugaugcgaugcgggggcugcugc

SEQ ID NO: 1779 - RNA, 23 nt, Artificial Sequence
  Description of Artificial Sequence: Synthetic oligonucleotide
gaugcgaugcgggggcugcugca

SEQ ID NO: 1780 - RNA, 23 nt, Artificial Sequence
  Description of Artificial Sequence: Synthetic oligonucleotide
augcgaugcgggggcugcugcaa

SEQ ID NO: 1781 - RNA, 23 nt, Artificial Sequence
  Description of Artificial Sequence: Synthetic oligonucleotide
ugcgaugcgggggcugcugcaau

SEQ ID NO: 1782 - RNA, 23 nt, Artificial Sequence
  Description of Artificial Sequence: Synthetic oligonucleotide
gcgaugcgggggcugcugcaaug

SEQ ID NO: 1783 - RNA, 23 nt, Artificial Sequence
  Description of Artificial Sequence: Synthetic oligonucleotide
cgaugcgggggcugcugcaauga

SEQ ID NO: 1784 - RNA, 23 nt, Artificial Sequence
  Description of Artificial Sequence: Synthetic oligonucleotide
gaugcgggggcugcugcaaugac

SEQ ID NO: 1785 - RNA, 23 nt, Artificial Sequence
  Description of Artificial Sequence: Synthetic oligonucleotide
augcgggggcugcugcaaugacg

SEQ ID NO: 1786 - RNA, 23 nt, Artificial Sequence
  Description of Artificial Sequence: Synthetic oligonucleotide
ugcgggggcugcugcaaugacga

SEQ ID NO: 1787 - RNA, 23 nt, Artificial Sequence
  Description of Artificial Sequence: Synthetic oligonucleotide
gcgggggcugcugcaaugacgag

SEQ ID NO: 1788 - RNA, 23 nt, Artificial Sequence
  Description of Artificial Sequence: Synthetic oligonucleotide
cgggggcugcugcaaugacgagg

SEQ ID NO: 1789 - RNA, 23 nt, Artificial Sequence
  Description of Artificial Sequence: Synthetic oligonucleotide
gggggcugcugcaaugacgaggg

SEQ ID NO: 1790 - RNA, 23 nt, Artificial Sequence
  Description of Artificial Sequence: Synthetic oligonucleotide
ggggcugcugcaaugacgagggc

SEQ ID NO: 1791 - RNA, 23 nt, Artificial Sequence
  Description of Artificial Sequence: Synthetic oligonucleotide
gggcugcugcaaugacgagggcc

SEQ ID NO: 1792 - RNA, 23 nt, Artificial Sequence
  Description of Artificial Sequence: Synthetic oligonucleotide
ggcugcugcaaugacgagggccu

SEQ ID NO: 1793 - RNA, 23 nt, Artificial Sequence
  Description of Artificial Sequence: Synthetic oligonucleotide
gcugcugcaaugacgagggccug

SEQ ID NO: 1794 - RNA, 23 nt, Artificial Sequence
  Description of Artificial Sequence: Synthetic oligonucleotide
cugcugcaaugacgagggccugg

SEQ ID NO: 1795 - RNA, 23 nt, Artificial Sequence
  Description of Artificial Sequence: Synthetic oligonucleotide
ugcugcaaugacgagggccugga

SEQ ID NO: 1796 - RNA, 23 nt, Artificial Sequence
  Description of Artificial Sequence: Synthetic oligonucleotide
gcugcaaugacgagggccuggag

SEQ ID NO: 1797 - RNA, 23 nt, Artificial Sequence
  Description of Artificial Sequence: Synthetic oligonucleotide
cugcaaugacgagggccuggagu

SEQ ID NO: 1798 - RNA, 23 nt, Artificial Sequence
  Description of Artificial Sequence: Synthetic oligonucleotide
ugcaaugacgagggccuggagug

SEQ ID NO: 1799 - RNA, 23 nt, Artificial Sequence
  Description of Artificial Sequence: Synthetic oligonucleotide
gcaaugacgagggccuggagugu

SEQ ID NO: 1800 - RNA, 23 nt, Artificial Sequence
  Description of Artificial Sequence: Synthetic oligonucleotide
caaugacgagggccuggagugug

SEQ ID NO: 1801 - RNA, 23 nt, Artificial Sequence
  Description of Artificial Sequence: Synthetic oligonucleotide
aaugacgagggccuggagugugu

SEQ ID NO: 1802 - RNA, 23 nt, Artificial Sequence
  Description of Artificial Sequence: Synthetic oligonucleotide
augacgagggccuggagugugug

SEQ ID NO: 1803 - RNA, 23 nt, Artificial Sequence
  Description of Artificial Sequence: Synthetic oligonucleotide
ugacgagggccuggagugugugc

SEQ ID NO: 1804 - RNA, 23 nt, Artificial Sequence
  Description of Artificial Sequence: Synthetic oligonucleotide
gacgagggccuggagugugugcc

SEQ ID NO: 1805 - RNA, 23 nt, Artificial Sequence
  Description of Artificial Sequence: Synthetic oligonucleotide
acgagggccuggagugugugccc

SEQ ID NO: 1806 - RNA, 23 nt, Artificial Sequence
  Description of Artificial Sequence: Synthetic oligonucleotide
cgagggccuggagugugugccca

SEQ ID NO: 1807 - RNA, 23 nt, Artificial Sequence
  Description of Artificial Sequence: Synthetic oligonucleotide
gagggccuggagugugugcccac

SEQ ID NO: 1808 - RNA, 23 nt, Artificial Sequence
  Description of Artificial Sequence: Synthetic oligonucleotide
agggccuggagugugugcccacu

SEQ ID NO: 1809 - RNA, 23 nt, Artificial Sequence
  Description of Artificial Sequence: Synthetic oligonucleotide
gggccuggagugugugcccacug

SEQ ID NO: 1810 - RNA, 23 nt, Artificial Sequence
  Description of Artificial Sequence: Synthetic oligonucleotide
ggccuggagugugugcccacuga

SEQ ID NO: 1811 - RNA, 23 nt, Artificial Sequence
  Description of Artificial Sequence: Synthetic oligonucleotide
gccuggagugugugcccacugag

SEQ ID NO: 1812 - RNA, 23 nt, Artificial Sequence
  Description of Artificial Sequence: Synthetic oligonucleotide
ccuggagugugugcccacugagg

SEQ ID NO: 1813 - RNA, 23 nt, Artificial Sequence
  Description of Artificial Sequence: Synthetic oligonucleotide
cuggagugugugcccacugagga

SEQ ID NO: 1814 - RNA, 23 nt, Artificial Sequence
  Description of Artificial Sequence: Synthetic oligonucleotide
uggagugugugcccacugaggag

SEQ ID NO: 1815 - RNA, 23 nt, Artificial Sequence
  Description of Artificial Sequence: Synthetic oligonucleotide
ggagugugugcccacugaggagu

SEQ ID NO: 1816 - RNA, 23 nt, Artificial Sequence
  Description of Artificial Sequence: Synthetic oligonucleotide
gagugugugcccacugaggaguc

SEQ ID NO: 1817 - RNA, 23 nt, Artificial Sequence
  Description of Artificial Sequence: Synthetic oligonucleotide
agugugugcccacugaggagucc

SEQ ID NO: 1818 - RNA, 23 nt, Artificial Sequence
  Description of Artificial Sequence: Synthetic oligonucleotide
gugugugcccacugaggagucca

SEQ ID NO: 1819 - RNA, 23 nt, Artificial Sequence
  Description of Artificial Sequence: Synthetic oligonucleotide
ugugugcccacugaggaguccaa

SEQ ID NO: 1820 - RNA, 23 nt, Artificial Sequence
  Description of Artificial Sequence: Synthetic oligonucleotide
gugugcccacugaggaguccaac

SEQ ID NO: 1821 - RNA, 23 nt, Artificial Sequence
  Description of Artificial Sequence: Synthetic oligonucleotide
ugugcccacugaggaguccaaca

SEQ ID NO: 1822 - RNA, 23 nt, Artificial Sequence
  Description of Artificial Sequence: Synthetic oligonucleotide
gugcccacugaggaguccaacau

SEQ ID NO: 1823 - RNA, 23 nt, Artificial Sequence
  Description of Artificial Sequence: Synthetic oligonucleotide
ugcccacugaggaguccaacauc

SEQ ID NO: 1824 - RNA, 23 nt, Artificial Sequence
  Description of Artificial Sequence: Synthetic oligonucleotide
gcccacugaggaguccaacauca

SEQ ID NO: 1825 - RNA, 23 nt, Artificial Sequence
  Description of Artificial Sequence: Synthetic oligonucleotide
cccacugaggaguccaacaucac

SEQ ID NO: 1826 - RNA, 23 nt, Artificial Sequence
  Description of Artificial Sequence: Synthetic oligonucleotide
ccacugaggaguccaacaucacc

SEQ ID NO: 1827 - RNA, 23 nt, Artificial Sequence
  Description of Artificial Sequence: Synthetic oligonucleotide
cacugaggaguccaacaucacca

SEQ ID NO: 1828 - RNA, 23 nt, Artificial Sequence
  Description of Artificial Sequence: Synthetic oligonucleotide
acugaggaguccaacaucaccau

SEQ ID NO: 1829 - RNA, 23 nt, Artificial Sequence
  Description of Artificial Sequence: Synthetic oligonucleotide
cugaggaguccaacaucaccaug

SEQ ID NO: 1830 - RNA, 23 nt, Artificial Sequence
  Description of Artificial Sequence: Synthetic oligonucleotide
ugaggaguccaacaucaccaugc

SEQ ID NO: 1831 - RNA, 23 nt, Artificial Sequence
  Description of Artificial Sequence: Synthetic oligonucleotide
gaggaguccaacaucaccaugca

SEQ ID NO: 1832 - RNA, 23 nt, Artificial Sequence
  Description of Artificial Sequence: Synthetic oligonucleotide
aggaguccaacaucaccaugcag

SEQ ID NO: 1833 - RNA, 23 nt, Artificial Sequence
  Description of Artificial Sequence: Synthetic oligonucleotide
ggaguccaacaucaccaugcaga

SEQ ID NO: 1834 - RNA, 23 nt, Artificial Sequence
  Description of Artificial Sequence: Synthetic oligonucleotide
gaguccaacaucaccaugcagau

SEQ ID NO: 1835 - RNA, 23 nt, Artificial Sequence
  Description of Artificial Sequence: Synthetic oligonucleotide
aguccaacaucaccaugcagauu

SEQ ID NO: 1836 - RNA, 23 nt, Artificial Sequence
  Description of Artificial Sequence: Synthetic oligonucleotide
guccaacaucaccaugcagauua

SEQ ID NO: 1837 - RNA, 23 nt, Artificial Sequence
  Description of Artificial Sequence: Synthetic oligonucleotide
uccaacaucaccaugcagauuau

SEQ ID NO: 1838 - RNA, 23 nt, Artificial Sequence
  Description of Artificial Sequence: Synthetic oligonucleotide
ccaacaucaccaugcagauuaug

SEQ ID NO: 1839 - RNA, 23 nt, Artificial Sequence
  Description of Artificial Sequence: Synthetic oligonucleotide
caacaucaccaugcagauuaugc

SEQ ID NO: 1840 - RNA, 23 nt, Artificial Sequence
  Description of Artificial Sequence: Synthetic oligonucleotide
aacaucaccaugcagauuaugcg

SEQ ID NO: 1841 - RNA, 23 nt, Artificial Sequence
  Description of Artificial Sequence: Synthetic oligonucleotide
acaucaccaugcagauuaugcgg

SEQ ID NO: 1842 - RNA, 23 nt, Artificial Sequence
  Description of Artificial Sequence: Synthetic oligonucleotide
caucaccaugcagauuaugcgga

SEQ ID NO: 1843 - RNA, 23 nt, Artificial Sequence
  Description of Artificial Sequence: Synthetic oligonucleotide
aucaccaugcagauuaugcggau

SEQ ID NO: 1844 - RNA, 23 nt, Artificial Sequence
  Description of Artificial Sequence: Synthetic oligonucleotide
ucaccaugcagauuaugcggauc

SEQ ID NO: 1845 - RNA, 23 nt, Artificial Sequence
  Description of Artificial Sequence: Synthetic oligonucleotide
caccaugcagauuaugcggauca

SEQ ID NO: 1846 - RNA, 23 nt, Artificial Sequence
  Description of Artificial Sequence: Synthetic oligonucleotide
accaugcagauuaugcggaucaa

SEQ ID NO: 1847 - RNA, 23 nt, Artificial Sequence
  Description of Artificial Sequence: Synthetic oligonucleotide
ccaugcagauuaugcggaucaaa

SEQ ID NO: 1848 - RNA, 23 nt, Artificial Sequence
  Description of Artificial Sequence: Synthetic oligonucleotide
caugcagauuaugcggaucaaac

SEQ ID NO: 1849 - RNA, 23 nt, Artificial Sequence
  Description of Artificial Sequence: Synthetic oligonucleotide
augcagauuaugcggaucaaacc

SEQ ID NO: 1850 - RNA, 23 nt, Artificial Sequence
  Description of Artificial Sequence: Synthetic oligonucleotide
ugcagauuaugcggaucaaaccu

SEQ ID NO: 1851 - RNA, 23 nt, Artificial Sequence
  Description of Artificial Sequence: Synthetic oligonucleotide
gcagauuaugcggaucaaaccuc

SEQ ID NO: 1852 - RNA, 23 nt, Artificial Sequence
  Description of Artificial Sequence: Synthetic oligonucleotide
cagauuaugcggaucaaaccuca

SEQ ID NO: 1853 - RNA, 23 nt, Artificial Sequence
  Description of Artificial Sequence: Synthetic oligonucleotide
agauuaugcggaucaaaccucac

SEQ ID NO: 1854 - RNA, 23 nt, Artificial Sequence
  Description of Artificial Sequence: Synthetic oligonucleotide
gauuaugcggaucaaaccucacc

SEQ ID NO: 1855 - RNA, 23 nt, Artificial Sequence
  Description of Artificial Sequence: Synthetic oligonucleotide
auuaugcggaucaaaccucacca

SEQ ID NO: 1856 - RNA, 23 nt, Artificial Sequence
  Description of Artificial Sequence: Synthetic oligonucleotide
uuaugcggaucaaaccucaccaa

SEQ ID NO: 1857 - RNA, 23 nt, Artificial Sequence
  Description of Artificial Sequence: Synthetic oligonucleotide
uaugcggaucaaaccucaccaag

SEQ ID NO: 1858 - RNA, 23 nt, Artificial Sequence
  Description of Artificial Sequence: Synthetic oligonucleotide
augcggaucaaaccucaccaagg

SEQ ID NO: 1859 - RNA, 23 nt, Artificial Sequence
  Description of Artificial Sequence: Synthetic oligonucleotide
ugcggaucaaaccucaccaaggc

SEQ ID NO: 1860 - RNA, 23 nt, Artificial Sequence
  Description of Artificial Sequence: Synthetic oligonucleotide
gcggaucaaaccucaccaaggcc

SEQ ID NO: 1861 - RNA, 23 nt, Artificial Sequence
  Description of Artificial Sequence: Synthetic oligonucleotide
cggaucaaaccucaccaaggcca

SEQ ID NO: 1862 - RNA, 23 nt, Artificial Sequence
  Description of Artificial Sequence: Synthetic oligonucleotide
ggaucaaaccucaccaaggccag

SEQ ID NO: 1863 - RNA, 23 nt, Artificial Sequence
  Description of Artificial Sequence: Synthetic oligonucleotide
gaucaaaccucaccaaggccagc

SEQ ID NO: 1864 - RNA, 23 nt, Artificial Sequence
  Description of Artificial Sequence: Synthetic oligonucleotide
aucaaaccucaccaaggccagca

SEQ ID NO: 1865 - RNA, 23 nt, Artificial Sequence
  Description of Artificial Sequence: Synthetic oligonucleotide
ucaaaccucaccaaggccagcac

SEQ ID NO: 1866 - RNA, 23 nt, Artificial Sequence
  Description of Artificial Sequence: Synthetic oligonucleotide
caaaccucaccaaggccagcaca

SEQ ID NO: 1867 - RNA, 23 nt, Artificial Sequence
  Description of Artificial Sequence: Synthetic oligonucleotide
aaaccucaccaaggccagcacau

SEQ ID NO: 1868 - RNA, 23 nt, Artificial Sequence
  Description of Artificial Sequence: Synthetic oligonucleotide
aaccucaccaaggccagcacaua

SEQ ID NO: 1869 - RNA, 23 nt, Artificial Sequence
  Description of Artificial Sequence: Synthetic oligonucleotide
accucaccaaggccagcacauag

SEQ ID NO: 1870 - RNA, 23 nt, Artificial Sequence
  Description of Artificial Sequence: Synthetic oligonucleotide
ccucaccaaggccagcacauagg

SEQ ID NO: 1871 - RNA, 23 nt, Artificial Sequence
  Description of Artificial Sequence: Synthetic oligonucleotide
cucaccaaggccagcacauagga

SEQ ID NO: 1872 - RNA, 23 nt, Artificial Sequence
  Description of Artificial Sequence: Synthetic oligonucleotide
ucaccaaggccagcacauaggag

SEQ ID NO: 1873 - RNA, 23 nt, Artificial Sequence
  Description of Artificial Sequence: Synthetic oligonucleotide
caccaaggccagcacauaggaga

SEQ ID NO: 1874 - RNA, 23 nt, Artificial Sequence
  Description of Artificial Sequence: Synthetic oligonucleotide
accaaggccagcacauaggagag

SEQ ID NO: 1875 - RNA, 23 nt, Artificial Sequence
  Description of Artificial Sequence: Synthetic oligonucleotide
ccaaggccagcacauaggagaga

SEQ ID NO: 1876 - RNA, 23 nt, Artificial Sequence
  Description of Artificial Sequence: Synthetic oligonucleotide
caaggccagcacauaggagagau

SEQ ID NO: 1877 - RNA, 23 nt, Artificial Sequence
  Description of Artificial Sequence: Synthetic oligonucleotide
aaggccagcacauaggagagaug

SEQ ID NO: 1878 - RNA, 23 nt, Artificial Sequence
  Description of Artificial Sequence: Synthetic oligonucleotide
aggccagcacauaggagagauga

SEQ ID NO: 1879 - RNA, 23 nt, Artificial Sequence
  Description of Artificial Sequence: Synthetic oligonucleotide
ggccagcacauaggagagaugag

SEQ ID NO: 1880 - RNA, 23 nt, Artificial Sequence
  Description of Artificial Sequence: Synthetic oligonucleotide
gccagcacauaggagagaugagc

SEQ ID NO: 1881 - RNA, 23 nt, Artificial Sequence
  Description of Artificial Sequence: Synthetic oligonucleotide
ccagcacauaggagagaugagcu

SEQ ID NO: 1882 - RNA, 23 nt, Artificial Sequence
  Description of Artificial Sequence: Synthetic oligonucleotide
cagcacauaggagagaugagcuu

SEQ ID NO: 1883 - RNA, 23 nt, Artificial Sequence
  Description of Artificial Sequence: Synthetic oligonucleotide
agcacauaggagagaugagcuuc

SEQ ID NO: 1884 - RNA, 23 nt, Artificial Sequence
  Description of Artificial Sequence: Synthetic oligonucleotide
gcacauaggagagaugagcuucc

SEQ ID NO: 1885 - RNA, 23 nt, Artificial Sequence
  Description of Artificial Sequence: Synthetic oligonucleotide
cacauaggagagaugagcuuccu

SEQ ID NO: 1886 - RNA, 23 nt, Artificial Sequence
  Description of Artificial Sequence: Synthetic oligonucleotide
acauaggagagaugagcuuccua

SEQ ID NO: 1887 - RNA, 23 nt, Artificial Sequence
  Description of Artificial Sequence: Synthetic oligonucleotide
cauaggagagaugagcuuccuac

SEQ ID NO: 1888 - RNA, 23 nt, Artificial Sequence
  Description of Artificial Sequence: Synthetic oligonucleotide
auaggagagaugagcuuccuaca

SEQ ID NO: 1889 - RNA, 23 nt, Artificial Sequence
  Description of Artificial Sequence: Synthetic oligonucleotide
uaggagagaugagcuuccuacag

SEQ ID NO: 1890 - RNA, 23 nt, Artificial Sequence
  Description of Artificial Sequence: Synthetic oligonucleotide
aggagagaugagcuuccuacagc

SEQ ID NO: 1891 - RNA, 23 nt, Artificial Sequence
  Description of Artificial Sequence: Synthetic oligonucleotide
ggagagaugagcuuccuacagca

SEQ ID NO: 1892 - RNA, 23 nt, Artificial Sequence
  Description of Artificial Sequence: Synthetic oligonucleotide
gagagaugagcuuccuacagcac

SEQ ID NO: 1893 - RNA, 23 nt, Artificial Sequence
  Description of Artificial Sequence: Synthetic oligonucleotide
agagaugagcuuccuacagcaca

SEQ ID NO: 1894 - RNA, 23 nt, Artificial Sequence
  Description of Artificial Sequence: Synthetic oligonucleotide
gagaugagcuuccuacagcacaa

SEQ ID NO: 1895 - RNA, 23 nt, Artificial Sequence
  Description of Artificial Sequence: Synthetic oligonucleotide
agaugagcuuccuacagcacaac

SEQ ID NO: 1896 - RNA, 23 nt, Artificial Sequence
  Description of Artificial Sequence: Synthetic oligonucleotide
gaugagcuuccuacagcacaaca

SEQ ID NO: 1897 - RNA, 23 nt, Artificial Sequence
  Description of Artificial Sequence: Synthetic oligonucleotide
augagcuuccuacagcacaacaa

SEQ ID NO: 1898 - RNA, 23 nt, Artificial Sequence
  Description of Artificial Sequence: Synthetic oligonucleotide
ugagcuuccuacagcacaacaaa

SEQ ID NO: 1899 - RNA, 23 nt, Artificial Sequence
  Description of Artificial Sequence: Synthetic oligonucleotide
gagcuuccuacagcacaacaaau

SEQ ID NO: 1900 - RNA, 23 nt, Artificial Sequence
  Description of Artificial Sequence: Synthetic oligonucleotide
agcuuccuacagcacaacaaaug

SEQ ID NO: 1901 - RNA, 23 nt, Artificial Sequence
  Description of Artificial Sequence: Synthetic oligonucleotide
gcuuccuacagcacaacaaaugu

SEQ ID NO: 1902 - RNA, 23 nt, Artificial Sequence
  Description of Artificial Sequence: Synthetic oligonucleotide
cuuccuacagcacaacaaaugug

SEQ ID NO: 1903 - RNA, 23 nt, Artificial Sequence
  Description of Artificial Sequence: Synthetic oligonucleotide
uuccuacagcacaacaaauguga

SEQ ID NO: 1904 - RNA, 23 nt, Artificial Sequence
  Description of Artificial Sequence: Synthetic oligonucleotide
uccuacagcacaacaaaugugaa

SEQ ID NO: 1905 - RNA, 23 nt, Artificial Sequence
  Description of Artificial Sequence: Synthetic oligonucleotide
ccuacagcacaacaaaugugaau

SEQ ID NO: 1906 - RNA, 23 nt, Artificial Sequence
  Description of Artificial Sequence: Synthetic oligonucleotide
cuacagcacaacaaaugugaaug

SEQ ID NO: 1907 - RNA, 23 nt, Artificial Sequence
  Description of Artificial Sequence: Synthetic oligonucleotide
uacagcacaacaaaugugaaugc

SEQ ID NO: 1908 - RNA, 23 nt, Artificial Sequence
  Description of Artificial Sequence: Synthetic oligonucleotide
acagcacaacaaaugugaaugca

SEQ ID NO: 1909 - RNA, 23 nt, Artificial Sequence
  Description of Artificial Sequence: Synthetic oligonucleotide
cagcacaacaaaugugaaugcag

SEQ ID NO: 1910 - RNA, 23 nt, Artificial Sequence
  Description of Artificial Sequence: Synthetic oligonucleotide
agcacaacaaaugugaaugcaga

SEQ ID NO: 1911 - RNA, 23 nt, Artificial Sequence
  Description of Artificial Sequence: Synthetic oligonucleotide
gcacaacaaaugugaaugcagac

SEQ ID NO: 1912 - RNA, 23 nt, Artificial Sequence
  Description of Artificial Sequence: Synthetic oligonucleotide
cacaacaaaugugaaugcagacc

SEQ ID NO: 1913 - RNA, 23 nt, Artificial Sequence
  Description of Artificial Sequence: Synthetic oligonucleotide
acaacaaaugugaaugcagacca

SEQ ID NO: 1914 - RNA, 23 nt, Artificial Sequence
  Description of Artificial Sequence: Synthetic oligonucleotide
caacaaaugugaaugcagaccaa

SEQ ID NO: 1915 - RNA, 23 nt, Artificial Sequence
  Description of Artificial Sequence: Synthetic oligonucleotide
aacaaaugugaaugcagaccaaa

SEQ ID NO: 1916 - RNA, 23 nt, Artificial Sequence
  Description of Artificial Sequence: Synthetic oligonucleotide
acaaaugugaaugcagaccaaag

SEQ ID NO: 1917 - RNA, 23 nt, Artificial Sequence
  Description of Artificial Sequence: Synthetic oligonucleotide
caaaugugaaugcagaccaaaga

SEQ ID NO: 1918 - RNA, 23 nt, Artificial Sequence
  Description of Artificial Sequence: Synthetic oligonucleotide
aaaugugaaugcagaccaaagaa

SEQ ID NO: 1919 - RNA, 23 nt, Artificial Sequence
  Description of Artificial Sequence: Synthetic oligonucleotide
aaugugaaugcagaccaaagaaa

SEQ ID NO: 1920 - RNA, 23 nt, Artificial Sequence
  Description of Artificial Sequence: Synthetic oligonucleotide
augugaaugcagaccaaagaaag

SEQ ID NO: 1921 - RNA, 23 nt, Artificial Sequence
  Description of Artificial Sequence: Synthetic oligonucleotide
ugugaaugcagaccaaagaaaga

SEQ ID NO: 1922 - RNA, 23 nt, Artificial Sequence
  Description of Artificial Sequence: Synthetic oligonucleotide
gugaaugcagaccaaagaaagau

SEQ ID NO: 1923 - RNA, 23 nt, Artificial Sequence
  Description of Artificial Sequence: Synthetic oligonucleotide
ugaaugcagaccaaagaaagaua

SEQ ID NO: 1924 - RNA, 23 nt, Artificial Sequence
  Description of Artificial Sequence: Synthetic oligonucleotide
gaaugcagaccaaagaaagauag

SEQ ID NO: 1925 - RNA, 23 nt, Artificial Sequence
  Description of Artificial Sequence: Synthetic oligonucleotide
aaugcagaccaaagaaagauaga

SEQ ID NO: 1926 - RNA, 23 nt, Artificial Sequence
  Description of Artificial Sequence: Synthetic oligonucleotide
augcagaccaaagaaagauagag

SEQ ID NO: 1927 - RNA, 23 nt, Artificial Sequence
  Description of Artificial Sequence: Synthetic oligonucleotide
ugcagaccaaagaaagauagagc

SEQ ID NO: 1928 - RNA, 23 nt, Artificial Sequence
  Description of Artificial Sequence: Synthetic oligonucleotide
gcagaccaaagaaagauagagca

SEQ ID NO: 1929 - RNA, 23 nt, Artificial Sequence
  Description of Artificial Sequence: Synthetic oligonucleotide
cagaccaaagaaagauagagcaa

SEQ ID NO: 1930 - RNA, 23 nt, Artificial Sequence
  Description of Artificial Sequence: Synthetic oligonucleotide
agaccaaagaaagauagagcaag

SEQ ID NO: 1931 - RNA, 23 nt, Artificial Sequence
  Description of Artificial Sequence: Synthetic oligonucleotide
gaccaaagaaagauagagcaaga

SEQ ID NO: 1932 - RNA, 23 nt, Artificial Sequence
  Description of Artificial Sequence: Synthetic oligonucleotide
accaaagaaagauagagcaagac

SEQ ID NO: 1933 - RNA, 23 nt, Artificial Sequence
  Description of Artificial Sequence: Synthetic oligonucleotide
ccaaagaaagauagagcaagaca

SEQ ID NO: 1934 - RNA, 23 nt, Artificial Sequence
  Description of Artificial Sequence: Synthetic oligonucleotide
caaagaaagauagagcaagacaa

SEQ ID NO: 1935 - RNA, 23 nt, Artificial Sequence
  Description of Artificial Sequence: Synthetic oligonucleotide
aaagaaagauagagcaagacaag

SEQ ID NO: 1936 - RNA, 23 nt, Artificial Sequence
  Description of Artificial Sequence: Synthetic oligonucleotide
aagaaagauagagcaagacaaga

SEQ ID NO: 1937 - RNA, 23 nt, Artificial Sequence
  Description of Artificial Sequence: Synthetic oligonucleotide
agaaagauagagcaagacaagaa

SEQ ID NO: 1938 - RNA, 23 nt, Artificial Sequence
  Description of Artificial Sequence: Synthetic oligonucleotide
gaaagauagagcaagacaagaaa

SEQ ID NO: 1939 - RNA, 23 nt, Artificial Sequence
  Description of Artificial Sequence: Synthetic oligonucleotide
aaagauagagcaagacaagaaaa

SEQ ID NO: 1940 - RNA, 21 nt, Artificial Sequence
  Description of Artificial Sequence: Synthetic oligonucleotide
gaacuuucugcugucuugggu

SEQ ID NO: 1941 - RNA, 23 nt, Artificial Sequence
  Description of Artificial Sequence: Synthetic oligonucleotide
acccaagacagcagaaaguucau

SEQ ID NO: 1942 - RNA, 21 nt, Artificial Sequence
  Description of Artificial Sequence: Synthetic oligonucleotide
gcauuggagccuugccuugcu

SEQ ID NO: 1943 - RNA, 23 nt, Artificial Sequence
  Description of Artificial Sequence: Synthetic oligonucleotide
agcaaggcaaggcuccaaugcac

SEQ ID NO: 1944 - DNA, 21 bp, Artificial Sequence
  Description of Artificial Sequence: Synthetic oligonucleotide
  Description of Combined DNA/RNA Molecule: Synthetic oligonucleotide
uaccuccaccaugccaagutt

SEQ ID NO: 1945 - DNA, 21 bp, Artificial Sequence
  Description of Artificial Sequence: Synthetic oligonucleotide
  Description of Combined DNA/RNA Molecule: Synthetic oligonucleotide
acuuggcaugguggagguatt

SEQ ID NO: 1946 - DNA, 21 bp, Artificial Sequence
  Description of Artificial Sequence: Synthetic oligonucleotide
  Description of Combined DNA/RNA Molecule: Synthetic oligonucleotide
accuccaccaugccaagugtt

SEQ ID NO: 1947 - DNA, 21 bp, Artificial Sequence
  Description of Artificial Sequence: Synthetic oligonucleotide
  Description of Combined DNA/RNA Molecule: Synthetic oligonucleotide
cacuuggcaugguggaggutt

SEQ ID NO: 1948 - RNA, 21 nt, Artificial Sequence
  Description of Artificial Sequence: Synthetic oligonucleotide
cuccaccaugccaaguggucc

SEQ ID NO: 1949 - RNA, 23 nt, Artificial Sequence
  Description of Artificial Sequence: Synthetic oligonucleotide
ggaccacuuggcaugguggaggu

SEQ ID NO: 1950 - DNA, 21 bp, Artificial Sequence
  Description of Artificial Sequence: Synthetic oligonucleotide
  Description of Combined DNA/RNA Molecule: Synthetic oligonucleotide
cuccaccaugccaaguggutt

SEQ ID NO: 1951 - DNA, 21 bp, Artificial Sequence
  Description of Artificial Sequence: Synthetic oligonucleotide
  Description of Combined DNA/RNA Molecule: Synthetic oligonucleotide
accacuuggcaugguggagtt

SEQ ID NO: 1952 - RNA, 21 nt, Artificial Sequence
  Description of Artificial Sequence: Synthetic oligonucleotide
uccaccaugccaagugguccc

SEQ ID NO: 1953 - RNA, 23 nt, Artificial Sequence
  Description of Artificial Sequence: Synthetic oligonucleotide
gggaccacuuggcaugguggagg

SEQ ID NO: 1954 - DNA, 21 bp, Artificial Sequence
  Description of Artificial Sequence: Synthetic oligonucleotide
  Description of Combined DNA/RNA Molecule: Synthetic oligonucleotide
uccaccaugccaagugguctt

SEQ ID NO: 1955 - DNA, 21 bp, Artificial Sequence
  Description of Artificial Sequence: Synthetic oligonucleotide
  Description of Combined DNA/RNA Molecule: Synthetic oligonucleotide
gaccacuuggcaugguggatt

SEQ ID NO: 1956 - RNA, 21 nt, Artificial Sequence
  Description of Artificial Sequence: Synthetic oligonucleotide
ccaccaugccaagugguccca

SEQ ID NO: 1957 - RNA, 23 nt, Artificial Sequence
  Description of Artificial Sequence: Synthetic oligonucleotide
ugggaccacuuggcaugguggag

SEQ ID NO: 1958 - DNA, 21 bp, Artificial Sequence
  Description of Artificial Sequence: Synthetic oligonucleotide
  Description of Combined DNA/RNA Molecule: Synthetic oligonucleotide
ccaccaugccaaguggucctt

SEQ ID NO: 1959 - DNA, 21 bp, Artificial Sequence
  Description of Artificial Sequence: Synthetic oligonucleotide
  Description of Combined DNA/RNA Molecule: Synthetic oligonucleotide
ggaccacuuggcaugguggtt

SEQ ID NO: 1960 - RNA, 21 nt, Artificial Sequence
  Description of Artificial Sequence: Synthetic oligonucleotide
caccaugccaaguggucccag

SEQ ID NO: 1961 - RNA, 23 nt, Artificial Sequence
  Description of Artificial Sequence: Synthetic oligonucleotide
cugggaccacuuggcauggugga

SEQ ID NO: 1962 - DNA, 21 bp, Artificial Sequence
  Description of Artificial Sequence: Synthetic oligonucleotide
  Description of Combined DNA/RNA Molecule: Synthetic oligonucleotide
caccaugccaagugguccctt

SEQ ID NO: 1963 - DNA, 21 bp, Artificial Sequence
  Description of Artificial Sequence: Synthetic oligonucleotide
  Description of Combined DNA/RNA Molecule: Synthetic oligonucleotide
gggaccacuuggcauggugtt

SEQ ID NO: 1964 - RNA, 21 nt, Artificial Sequence
  Description of Artificial Sequence: Synthetic oligonucleotide
accaugccaaguggucccagg

SEQ ID NO: 1965 - RNA, 23 nt, Artificial Sequence
  Description of Artificial Sequence: Synthetic oligonucleotide
ccugggaccacuuggcauggugg

SEQ ID NO: 1966 - DNA, 21 bp, Artificial Sequence
  Description of Artificial Sequence: Synthetic oligonucleotide
  Description of Combined DNA/RNA Molecule: Synthetic oligonucleotide
accaugccaaguggucccatt

SEQ ID NO: 1967 - DNA, 21 bp, Artificial Sequence
  Description of Artificial Sequence: Synthetic oligonucleotide
  Description of Combined DNA/RNA Molecule: Synthetic oligonucleotide
ugggaccacuuggcauggutt

SEQ ID NO: 1968 - RNA, 21 nt, Artificial Sequence
  Description of Artificial Sequence: Synthetic oligonucleotide
ccaugccaaguggucccaggc

SEQ ID NO: 1969 - RNA, 23 nt, Artificial Sequence
  Description of Artificial Sequence: Synthetic oligonucleotide
gccugggaccacuuggcauggug

SEQ ID NO: 1970 - DNA, 21 bp, Artificial Sequence
  Description of Artificial Sequence: Synthetic oligonucleotide
  Description of Combined DNA/RNA Molecule: Synthetic oligonucleotide
ccaugccaaguggucccagtt

SEQ ID NO: 1971 - DNA, 21 bp, Artificial Sequence
  Description of Artificial Sequence: Synthetic oligonucleotide
  Description of Combined DNA/RNA Molecule: Synthetic oligonucleotide
cugggaccacuuggcauggtt

SEQ ID NO: 1972 - RNA, 21 nt, Artificial Sequence
  Description of Artificial Sequence: Synthetic oligonucleotide
caugccaaguggucccaggcu

SEQ ID NO: 1973 - RNA, 23 nt, Artificial Sequence
  Description of Artificial Sequence: Synthetic oligonucleotide
agccugggaccacuuggcauggu

SEQ ID NO: 1974 - DNA, 21 bp, Artificial Sequence
  Description of Artificial Sequence: Synthetic oligonucleotide
  Description of Combined DNA/RNA Molecule: Synthetic oligonucleotide
caugccaaguggucccaggtt

SEQ ID NO: 1975 - DNA, 21 bp, Artificial Sequence
  Description of Artificial Sequence: Synthetic oligonucleotide
  Description of Combined DNA/RNA Molecule: Synthetic oligonucleotide
ccugggaccacuuggcaugtt

SEQ ID NO: 1976 - RNA, 21 nt, Artificial Sequence
  Description of Artificial Sequence: Synthetic oligonucleotide
augccaaguggucccaggcug

SEQ ID NO: 1977 - RNA, 23 nt, Artificial Sequence
  Description of Artificial Sequence: Synthetic oligonucleotide
cagccugggaccacuuggcaugg

SEQ ID NO: 1978 - DNA, 21 bp, Artificial Sequence
  Description of Artificial Sequence: Synthetic oligonucleotide
  Description of Combined DNA/RNA Molecule: Synthetic oligonucleotide
augccaaguggucccaggctt

SEQ ID NO: 1979 - DNA, 21 bp, Artificial Sequence
  Description of Artificial Sequence: Synthetic oligonucleotide
  Description of Combined DNA/RNA Molecule: Synthetic oligonucleotide
gccugggaccacuuggcautt

SEQ ID NO: 1980 - RNA, 21 nt, Artificial Sequence
  Description of Artificial Sequence: Synthetic oligonucleotide
ugccaaguggucccaggcugc

SEQ ID NO: 1981 - RNA, 23 nt, Artificial Sequence
  Description of Artificial Sequence: Synthetic oligonucleotide
gcagccugggaccacuuggcaug

SEQ ID NO: 1982 - DNA, 21 bp, Artificial Sequence
  Description of Artificial Sequence: Synthetic oligonucleotide
  Description of Combined DNA/RNA Molecule: Synthetic oligonucleotide
ugccaaguggucccaggcutt

SEQ ID NO: 1983 - DNA, 21 bp, Artificial Sequence
  Description of Artificial Sequence: Synthetic oligonucleotide
  Description of Combined DNA/RNA Molecule: Synthetic oligonucleotide
agccugggaccacuuggcatt

SEQ ID NO: 1984 - RNA, 21 nt, Artificial Sequence
  Description of Artificial Sequence: Synthetic oligonucleotide
gccaaguggucccaggcugca

SEQ ID NO: 1985 - RNA, 23 nt, Artificial Sequence
  Description of Artificial Sequence: Synthetic oligonucleotide
ugcagccugggaccacuuggcau

SEQ ID NO: 1986 - DNA, 21 bp, Artificial Sequence
  Description of Artificial Sequence: Synthetic oligonucleotide
  Description of Combined DNA/RNA Molecule: Synthetic oligonucleotide
gccaaguggucccaggcugtt

SEQ ID NO: 1987 - DNA, 21 bp, Artificial Sequence
  Description of Artificial Sequence: Synthetic oligonucleotide
  Description of Combined DNA/RNA Molecule: Synthetic oligonucleotide
cagccugggaccacuuggctt

SEQ ID NO: 1988 - RNA, 21 nt, Artificial Sequence
  Description of Artificial Sequence: Synthetic oligonucleotide
ccaaguggucccaggcugcac

SEQ ID NO: 1989 - RNA, 23 nt, Artificial Sequence
  Description of Artificial Sequence: Synthetic oligonucleotide
gugcagccugggaccacuuggca

SEQ ID NO: 1990 - DNA, 21 bp, Artificial Sequence
  Description of Artificial Sequence: Synthetic oligonucleotide
  Description of Combined DNA/RNA Molecule: Synthetic oligonucleotide
ccaaguggucccaggcugctt

SEQ ID NO: 1991 - DNA, 21 bp, Artificial Sequence
  Description of Artificial Sequence: Synthetic oligonucleotide
  Description of Combined DNA/RNA Molecule: Synthetic oligonucleotide
gcagccugggaccacuuggtt

SEQ ID NO: 1992 - RNA, 21 nt, Artificial Sequence
  Description of Artificial Sequence: Synthetic oligonucleotide
caaguggucccaggcugcacc

SEQ ID NO: 1993 - RNA, 23 nt, Artificial Sequence
  Description of Artificial Sequence: Synthetic oligonucleotide
ggugcagccugggaccacuuggc

SEQ ID NO: 1994 - DNA, 21 bp, Artificial Sequence
  Description of Artificial Sequence: Synthetic oligonucleotide
  Description of Combined DNA/RNA Molecule: Synthetic oligonucleotide
caaguggucccaggcugcatt

SEQ ID NO: 1995 - DNA, 21 bp, Artificial Sequence
  Description of Artificial Sequence: Synthetic oligonucleotide
  Description of Combined DNA/RNA Molecule: Synthetic oligonucleotide
ugcagccugggaccacuugtt

SEQ ID NO: 1996 - RNA, 21 nt, Artificial Sequence
  Description of Artificial Sequence: Synthetic oligonucleotide
aaguggucccaggcugcaccc

SEQ ID NO: 1997 - RNA, 23 nt, Artificial Sequence
  Description of Artificial Sequence: Synthetic oligonucleotide
gggugcagccugggaccacuugg

SEQ ID NO: 1998 - DNA, 21 bp, Artificial Sequence
  Description of Artificial Sequence: Synthetic oligonucleotide
  Description of Combined DNA/RNA Molecule: Synthetic oligonucleotide
aaguggucccaggcugcactt

SEQ ID NO: 1999 - DNA, 21 bp, Artificial Sequence
  Description of Artificial Sequence: Synthetic oligonucleotide
  Description of Combined DNA/RNA Molecule: Synthetic oligonucleotide
gugcagccugggaccacuutt

SEQ ID NO: 2000 - RNA, 21 nt, Artificial Sequence
  Description of Artificial Sequence: Synthetic oligonucleotide
aguggucccaggcugcaccca

SEQ ID NO: 2001 - RNA, 23 nt, Artificial Sequence
  Description of Artificial Sequence: Synthetic oligonucleotide
ugggugcagccugggaccacuug

SEQ ID NO: 2002 - DNA, 21 bp, Artificial Sequence
  Description of Artificial Sequence: Synthetic oligonucleotide
  Description of Combined DNA/RNA Molecule: Synthetic oligonucleotide
aguggucccaggcugcacctt

SEQ ID NO: 2003 - DNA, 21 bp, Artificial Sequence
  Description of Artificial Sequence: Synthetic oligonucleotide
  Description of Combined DNA/RNA Molecule: Synthetic oligonucleotide
ggugcagccugggaccacutt

SEQ ID NO: 2004 - DNA, 21 bp, Artificial Sequence
  Description of Artificial Sequence: Synthetic oligonucleotide
  Description of Combined DNA/RNA Molecule: Synthetic oligonucleotide
guggucccaggcugcaccctt

SEQ ID NO: 2005 - DNA, 21 bp, Artificial Sequence
  Description of Artificial Sequence: Synthetic oligonucleotide
  Description of Combined DNA/RNA Molecule: Synthetic oligonucleotide
gggugcagccugggaccactt

SEQ ID NO: 2006 - DNA, 21 bp, Artificial Sequence
  Description of Artificial Sequence: Synthetic oligonucleotide
  Description of Combined DNA/RNA Molecule: Synthetic oligonucleotide
ggcagaaucaucacgaagutt

SEQ ID NO: 2007 - DNA, 21 bp, Artificial Sequence
  Description of Artificial Sequence: Synthetic oligonucleotide
  Description of Combined DNA/RNA Molecule: Synthetic oligonucleotide
acuucgugaugauucugcctt

SEQ ID NO: 2008 - DNA, 21 bp, Artificial Sequence
  Description of Artificial Sequence: Synthetic oligonucleotide
  Description of Combined DNA/RNA Molecule: Synthetic oligonucleotide
gcagaaucaucacgaagugtt

SEQ ID NO: 2009 - DNA, 21 bp, Artificial Sequence
  Description of Artificial Sequence: Synthetic oligonucleotide
  Description of Combined DNA/RNA Molecule: Synthetic oligonucleotide
cacuucgugaugauucugctt

SEQ ID NO: 2010 - DNA, 21 bp, Artificial Sequence
  Description of Artificial Sequence: Synthetic oligonucleotide
  Description of Combined DNA/RNA Molecule: Synthetic oligonucleotide
cagaaucaucacgaaguggtt

SEQ ID NO: 2011 - DNA, 21 bp, Artificial Sequence
  Description of Artificial Sequence: Synthetic oligonucleotide
  Description of Combined DNA/RNA Molecule: Synthetic oligonucleotide
ccacuucgugaugauucugtt

SEQ ID NO: 2012 - RNA, 21 nt, Artificial Sequence
  Description of Artificial Sequence: Synthetic oligonucleotide
agaaucaucacgaagugguga

SEQ ID NO: 2013 - RNA, 23 nt, Artificial Sequence
  Description of Artificial Sequence: Synthetic oligonucleotide
ucaccacuucgugaugauucugc

SEQ ID NO: 2014 - DNA, 21 bp, Artificial Sequence
  Description of Artificial Sequence: Synthetic oligonucleotide
  Description of Combined DNA/RNA Molecule: Synthetic oligonucleotide
agaaucaucacgaaguggutt

SEQ ID NO: 2015 - DNA, 21 bp, Artificial Sequence
  Description of Artificial Sequence: Synthetic oligonucleotide
  Description of Combined DNA/RNA Molecule: Synthetic oligonucleotide
accacuucgugaugauucutt

SEQ ID NO: 2016 - DNA, 21 bp, Artificial Sequence
  Description of Artificial Sequence: Synthetic oligonucleotide
  Description of Combined DNA/RNA Molecule: Synthetic oligonucleotide
gaaucaucacgaaguggugtt

SEQ ID NO: 2017 - DNA, 21 bp, Artificial Sequence
  Description of Artificial Sequence: Synthetic oligonucleotide
  Description of Combined DNA/RNA Molecule: Synthetic oligonucleotide
caccacuucgugaugauuctt

SEQ ID NO: 2018 - DNA, 21 bp, Artificial Sequence
  Description of Artificial Sequence: Synthetic oligonucleotide
  Description of Combined DNA/RNA Molecule: Synthetic oligonucleotide
aaucaucacgaaguggugatt

SEQ ID NO: 2019 - DNA, 21 bp, Artificial Sequence
  Description of Artificial Sequence: Synthetic oligonucleotide
  Description of Combined DNA/RNA Molecule: Synthetic oligonucleotide
ucaccacuucgugaugauutt

SEQ ID NO: 2020 - DNA, 21 bp, Artificial Sequence
  Description of Artificial Sequence: Synthetic oligonucleotide
  Description of Combined DNA/RNA Molecule: Synthetic oligonucleotide
aucaucacgaaguggugaatt

SEQ ID NO: 2021 - DNA, 21 bp, Artificial Sequence
  Description of Artificial Sequence: Synthetic oligonucleotide
  Description of Combined DNA/RNA Molecule: Synthetic oligonucleotide
uucaccacuucgugaugautt

SEQ ID NO: 2022 - RNA, 21 nt, Artificial Sequence
  Description of Artificial Sequence: Synthetic oligonucleotide
gaaguggugaaguucauggau

SEQ ID NO: 2023 - RNA, 23 nt, Artificial Sequence
  Description of Artificial Sequence: Synthetic oligonucleotide
auccaugaacuucaccacuucgu

SEQ ID NO: 2024 - RNA, 21 nt, Artificial Sequence
  Description of Artificial Sequence: Synthetic oligonucleotide
gaaguucauggaugucuauca

SEQ ID NO: 2025 - RNA, 23 nt, Artificial Sequence
  Description of Artificial Sequence: Synthetic oligonucleotide
ugauagacauccaugaacuucac

SEQ ID NO: 2026 - DNA, 21 bp, Artificial Sequence
  Description of Artificial Sequence: Synthetic oligonucleotide
  Description of Combined DNA/RNA Molecule: Synthetic oligonucleotide
uggaugucuaucagcgcagtt

SEQ ID NO: 2027 - DNA, 21 bp, Artificial Sequence
  Description of Artificial Sequence: Synthetic oligonucleotide
  Description of Combined DNA/RNA Molecule: Synthetic oligonucleotide
cugcgcugauagacauccatt

SEQ ID NO: 2028 - RNA, 21 nt, Artificial Sequence
  Description of Artificial Sequence: Synthetic oligonucleotide
ggaugucuaucagcgcagcua

SEQ ID NO: 2029 - RNA, 23 nt, Artificial Sequence
  Description of Artificial Sequence: Synthetic oligonucleotide
uagcugcgcugauagacauccau

SEQ ID NO: 2030 - DNA, 21 bp, Artificial Sequence
  Description of Artificial Sequence: Synthetic oligonucleotide
  Description of Combined DNA/RNA Molecule: Synthetic oligonucleotide
ggaugucuaucagcgcagctt

SEQ ID NO: 2031 - DNA, 21 bp, Artificial Sequence
  Description of Artificial Sequence: Synthetic oligonucleotide
  Description of Combined DNA/RNA Molecule: Synthetic oligonucleotide
gcugcgcugauagacaucctt

SEQ ID NO: 2032 - DNA, 21 bp, Artificial Sequence
  Description of Artificial Sequence: Synthetic oligonucleotide
  Description of Combined DNA/RNA Molecule: Synthetic oligonucleotide
gaugucuaucagcgcagcutt

SEQ ID NO: 2033 - DNA, 21 bp, Artificial Sequence
  Description of Artificial Sequence: Synthetic oligonucleotide
  Description of Combined DNA/RNA Molecule: Synthetic oligonucleotide
agcugcgcugauagacauctt

SEQ ID NO: 2034 - DNA, 21 bp, Artificial Sequence
  Description of Artificial Sequence: Synthetic oligonucleotide
  Description of Combined DNA/RNA Molecule: Synthetic oligonucleotide
augucuaucagcgcagcuatt

SEQ ID NO: 2035 - DNA, 21 bp, Artificial Sequence
  Description of Artificial Sequence: Synthetic oligonucleotide
  Description of Combined DNA/RNA Molecule: Synthetic oligonucleotide
uagcugcgcugauagacautt

SEQ ID NO: 2036 - DNA, 21 bp, Artificial Sequence
  Description of Artificial Sequence: Synthetic oligonucleotide
  Description of Combined DNA/RNA Molecule: Synthetic oligonucleotide
ugucuaucagcgcagcuactt

SEQ ID NO: 2037 - DNA, 21 bp, Artificial Sequence
  Description of Artificial Sequence: Synthetic oligonucleotide
  Description of Combined DNA/RNA Molecule: Synthetic oligonucleotide
guagcugcgcugauagacatt

SEQ ID NO: 2038 - RNA, 21 nt, Artificial Sequence
  Description of Artificial Sequence: Synthetic oligonucleotide
gucuaucagcgcagcuacugc

SEQ ID NO: 2039 - RNA, 23 nt, Artificial Sequence
  Description of Artificial Sequence: Synthetic oligonucleotide
gcaguagcugcgcugauagacau

SEQ ID NO: 2040 - DNA, 21 bp, Artificial Sequence
  Description of Artificial Sequence: Synthetic oligonucleotide
  Description of Combined DNA/RNA Molecule: Synthetic oligonucleotide
gucuaucagcgcagcuacutt

SEQ ID NO: 2041 - DNA, 21 bp, Artificial Sequence
  Description of Artificial Sequence: Synthetic oligonucleotide
  Description of Combined DNA/RNA Molecule: Synthetic oligonucleotide
aguagcugcgcugauagactt

SEQ ID NO: 2042 - DNA, 21 bp, Artificial Sequence
  Description of Artificial Sequence: Synthetic oligonucleotide
  Description of Combined DNA/RNA Molecule: Synthetic oligonucleotide
ucuaucagcgcagcuacugtt

SEQ ID NO: 2043 - DNA, 21 bp, Artificial Sequence
  Description of Artificial Sequence: Synthetic oligonucleotide
  Description of Combined DNA/RNA Molecule: Synthetic oligonucleotide
caguagcugcgcugauagatt

SEQ ID NO: 2044 - RNA, 21 nt, Artificial Sequence
  Description of Artificial Sequence: Synthetic oligonucleotide
gcagcuacugccauccaaucg

SEQ ID NO: 2045 - RNA, 23 nt, Artificial Sequence
  Description of Artificial Sequence: Synthetic oligonucleotide
cgauuggauggcaguagcugcgc

SEQ ID NO: 2046 - RNA, 21 nt, Artificial Sequence
  Description of Artificial Sequence: Synthetic oligonucleotide
agcuacugccauccaaucgag

SEQ ID NO: 2047 - RNA, 23 nt, Artificial Sequence
  Description of Artificial Sequence: Synthetic oligonucleotide
cucgauuggauggcaguagcugc

SEQ ID NO: 2048 - DNA, 21 bp, Artificial Sequence
  Description of Artificial Sequence: Synthetic oligonucleotide
  Description of Combined DNA/RNA Molecule: Synthetic oligonucleotide
uacugccauccaaucgagatt

SEQ ID NO: 2049 - DNA, 21 bp, Artificial Sequence
  Description of Artificial Sequence: Synthetic oligonucleotide
  Description of Combined DNA/RNA Molecule: Synthetic oligonucleotide
ucucgauuggauggcaguatt

SEQ ID NO: 2050 - DNA, 21 bp, Artificial Sequence
  Description of Artificial Sequence: Synthetic oligonucleotide
  Description of Combined DNA/RNA Molecule: Synthetic oligonucleotide
acugccauccaaucgagactt

SEQ ID NO: 2051 - DNA, 21 bp, Artificial Sequence
  Description of Artificial Sequence: Synthetic oligonucleotide
  Description of Combined DNA/RNA Molecule: Synthetic oligonucleotide
gucucgauuggauggcagutt

SEQ ID NO: 2052 - DNA, 21 bp, Artificial Sequence
  Description of Artificial Sequence: Synthetic oligonucleotide
  Description of Combined DNA/RNA Molecule: Synthetic oligonucleotide
cugccauccaaucgagacctt

SEQ ID NO: 2053 - DNA, 21 bp, Artificial Sequence
  Description of Artificial Sequence: Synthetic oligonucleotide
  Description of Combined DNA/RNA Molecule: Synthetic oligonucleotide
ggucucgauuggauggcagtt

SEQ ID NO: 2054 - DNA, 21 bp, Artificial Sequence
  Description of Artificial Sequence: Synthetic oligonucleotide
  Description of Combined DNA/RNA Molecule: Synthetic oligonucleotide
ugccauccaaucgagaccctt

SEQ ID NO: 2055 - DNA, 21 bp, Artificial Sequence
  Description of Artificial Sequence: Synthetic oligonucleotide
  Description of Combined DNA/RNA Molecule: Synthetic oligonucleotide
gggucucgauuggauggcatt

SEQ ID NO: 2056 - RNA, 21 nt, Artificial Sequence
  Description of Artificial Sequence: Synthetic oligonucleotide
gacccugguggacaucuucca

SEQ ID NO: 2057 - RNA, 23 nt, Artificial Sequence
  Description of Artificial Sequence: Synthetic oligonucleotide
uggaagauguccaccagggucuc

SEQ ID NO: 2058 - DNA, 21 bp, Artificial Sequence
  Description of Artificial Sequence: Synthetic oligonucleotide
  Description of Combined DNA/RNA Molecule: Synthetic oligonucleotide
gacccugguggacaucuuctt

SEQ ID NO: 2059 - DNA, 21 bp, Artificial Sequence
  Description of Artificial Sequence: Synthetic oligonucleotide
  Description of Combined DNA/RNA Molecule: Synthetic oligonucleotide
gaagauguccaccaggguctt

SEQ ID NO: 2060 - RNA, 21 nt, Artificial Sequence
  Description of Artificial Sequence: Synthetic oligonucleotide
acccugguggacaucuuccag

SEQ ID NO: 2061 - RNA, 23 nt, Artificial Sequence
  Description of Artificial Sequence: Synthetic oligonucleotide
cuggaagauguccaccagggucu

SEQ ID NO: 2062 - DNA, 21 bp, Artificial Sequence
  Description of Artificial Sequence: Synthetic oligonucleotide
  Description of Combined DNA/RNA Molecule: Synthetic oligonucleotide
acccugguggacaucuucctt

SEQ ID NO: 2063 - DNA, 21 bp, Artificial Sequence
  Description of Artificial Sequence: Synthetic oligonucleotide
  Description of Combined DNA/RNA Molecule: Synthetic oligonucleotide
ggaagauguccaccagggutt

SEQ ID NO: 2064 - RNA, 21 nt, Artificial Sequence
  Description of Artificial Sequence: Synthetic oligonucleotide
cccugguggacaucuuccagg

SEQ ID NO: 2065 - RNA, 23 nt, Artificial Sequence
  Description of Artificial Sequence: Synthetic oligonucleotide
ccuggaagauguccaccaggguc

SEQ ID NO: 2066 - DNA, 21 bp, Artificial Sequence
  Description of Artificial Sequence: Synthetic oligonucleotide
  Description of Combined DNA/RNA Molecule: Synthetic oligonucleotide
cccugguggacaucuuccatt

SEQ ID NO: 2067 - DNA, 21 bp, Artificial Sequence
  Description of Artificial Sequence: Synthetic oligonucleotide
  Description of Combined DNA/RNA Molecule: Synthetic oligonucleotide
uggaagauguccaccagggtt

SEQ ID NO: 2068 - RNA, 21 nt, Artificial Sequence
  Description of Artificial Sequence: Synthetic oligonucleotide
ccugguggacaucuuccagga

SEQ ID NO: 2069 - RNA, 23 nt, Artificial Sequence
  Description of Artificial Sequence: Synthetic oligonucleotide
uccuggaagauguccaccagggu

SEQ ID NO: 2070 - DNA, 21 bp, Artificial Sequence
  Description of Artificial Sequence: Synthetic oligonucleotide
  Description of Combined DNA/RNA Molecule: Synthetic oligonucleotide
ccugguggacaucuuccagtt

SEQ ID NO: 2071 - DNA, 21 bp, Artificial Sequence
  Description of Artificial Sequence: Synthetic oligonucleotide
  Description of Combined DNA/RNA Molecule: Synthetic oligonucleotide
cuggaagauguccaccaggtt

SEQ ID NO: 2072 - RNA, 21 nt, Artificial Sequence
  Description of Artificial Sequence: Synthetic oligonucleotide
cugguggacaucuuccaggag

SEQ ID NO: 2073 - RNA, 23 nt, Artificial Sequence
  Description of Artificial Sequence: Synthetic oligonucleotide
cuccuggaagauguccaccaggg

SEQ ID NO: 2074 - DNA, 21 bp, Artificial Sequence
  Description of Artificial Sequence: Synthetic oligonucleotide
  Description of Combined DNA/RNA Molecule: Synthetic oligonucleotide
cugguggacaucuuccaggtt

SEQ ID NO: 2075 - DNA, 21 bp, Artificial Sequence
  Description of Artificial Sequence: Synthetic oligonucleotide
  Description of Combined DNA/RNA Molecule: Synthetic oligonucleotide
ccuggaagauguccaccagtt

SEQ ID NO: 2076 - RNA, 21 nt, Artificial Sequence
  Description of Artificial Sequence: Synthetic oligonucleotide
ugguggacaucuuccaggagu

SEQ ID NO: 2077 - RNA, 23 nt, Artificial Sequence
  Description of Artificial Sequence: Synthetic oligonucleotide
acuccuggaagauguccaccagg

SEQ ID NO: 2078 - DNA, 21 bp, Artificial Sequence
  Description of Artificial Sequence: Synthetic oligonucleotide
  Description of Combined DNA/RNA Molecule: Synthetic oligonucleotide
ugguggacaucuuccaggatt

SEQ ID NO: 2079 - DNA, 21 bp, Artificial Sequence
  Description of Artificial Sequence: Synthetic oligonucleotide
  Description of Combined DNA/RNA Molecule: Synthetic oligonucleotide
uccuggaagauguccaccatt

SEQ ID NO: 2080 - RNA, 21 nt, Artificial Sequence
  Description of Artificial Sequence: Synthetic oligonucleotide
gguggacaucuuccaggagua

SEQ ID NO: 2081 - RNA, 23 nt, Artificial Sequence
  Description of Artificial Sequence: Synthetic oligonucleotide
uacuccuggaagauguccaccag

SEQ ID NO: 2082 - DNA, 21 bp, Artificial Sequence
  Description of Artificial Sequence: Synthetic oligonucleotide
  Description of Combined DNA/RNA Molecule: Synthetic oligonucleotide
gguggacaucuuccaggagtt

SEQ ID NO: 2083 - DNA, 21 bp, Artificial Sequence
  Description of Artificial Sequence: Synthetic oligonucleotide
  Description of Combined DNA/RNA Molecule: Synthetic oligonucleotide
cuccuggaagauguccacctt

SEQ ID NO: 2084 - RNA, 21 nt, Artificial Sequence
  Description of Artificial Sequence: Synthetic oligonucleotide
ggacaucuuccaggaguaccc

SEQ ID NO: 2085 - RNA, 21 nt, Artificial Sequence
  Description of Artificial Sequence: Synthetic oligonucleotide
ggguacuccuggaagaugucc

SEQ ID NO: 2086 - RNA, 21 nt, Artificial Sequence
  Description of Artificial Sequence: Synthetic oligonucleotide
ggacaucuuccaggaguaccc

SEQ ID NO: 2087 - RNA, 21 nt, Artificial Sequence
  Description of Artificial Sequence: Synthetic oligonucleotide
ggguacuccuggaagaugucc

SEQ ID NO: 2088 - DNA, 21 bp, Artificial Sequence
  Description of Artificial Sequence: Synthetic oligonucleotide
  Description of Combined DNA/RNA Molecule: Synthetic oligonucleotide
ggacaucuuccaggaguactt

SEQ ID NO: 2089 - DNA, 21 bp, Artificial Sequence
  Description of Artificial Sequence: Synthetic oligonucleotide
  Description of Combined DNA/RNA Molecule: Synthetic oligonucleotide
guacuccuggaagaugucctt

SEQ ID NO: 2090 - RNA, 19 nt, Artificial Sequence
  Description of Artificial Sequence: Synthetic oligonucleotide
ggacaucuuccaggaguac

SEQ ID NO: 2091 - RNA, 19 nt, Artificial Sequence
  Description of Artificial Sequence: Synthetic oligonucleotide
guacuccuggaagaugucc

SEQ ID NO: 2092 - RNA, 21 nt, Artificial Sequence
  Description of Artificial Sequence: Synthetic oligonucleotide
aucuuccaggaguacccugau

SEQ ID NO: 2093 - RNA, 23 nt, Artificial Sequence
  Description of Artificial Sequence: Synthetic oligonucleotide
aucaggguacuccuggaagaugu

SEQ ID NO: 2094 - DNA, 21 bp, Artificial Sequence
  Description of Artificial Sequence: Synthetic oligonucleotide
  Description of Combined DNA/RNA Molecule: Synthetic oligonucleotide
uacccugaugagaucgagutt

SEQ ID NO: 2095 - DNA, 21 bp, Artificial Sequence
  Description of Artificial Sequence: Synthetic oligonucleotide
  Description of Combined DNA/RNA Molecule: Synthetic oligonucleotide
acucgaucucaucaggguatt

SEQ ID NO: 2096 - RNA, 21 nt, Artificial Sequence
  Description of Artificial Sequence: Synthetic oligonucleotide
acccugaugagaucgaguaca

SEQ ID NO: 2097 - RNA, 23 nt, Artificial Sequence
  Description of Artificial Sequence: Synthetic oligonucleotide
uguacucgaucucaucaggguac

SEQ ID NO: 2098 - DNA, 21 bp, Artificial Sequence
  Description of Artificial Sequence: Synthetic oligonucleotide
  Description of Combined DNA/RNA Molecule: Synthetic oligonucleotide
acccugaugagaucgaguatt

SEQ ID NO: 2099 - DNA, 21 bp, Artificial Sequence
  Description of Artificial Sequence: Synthetic oligonucleotide
  Description of Combined DNA/RNA Molecule: Synthetic oligonucleotide
uacucgaucucaucagggutt

SEQ ID NO: 2100 - DNA, 21 bp, Artificial Sequence
  Description of Artificial Sequence: Synthetic oligonucleotide
  Description of Combined DNA/RNA Molecule: Synthetic oligonucleotide
uacaucuucaagccauccutt

SEQ ID NO: 2101 - DNA, 21 bp, Artificial Sequence
  Description of Artificial Sequence: Synthetic oligonucleotide
  Description of Combined DNA/RNA Molecule: Synthetic oligonucleotide
aggauggcuugaagauguatt

SEQ ID NO: 2102 - RNA, 21 nt, Artificial Sequence
  Description of Artificial Sequence: Synthetic oligonucleotide
aaugacgagggccuggagugu

SEQ ID NO: 2103 - RNA, 23 nt, Artificial Sequence
  Description of Artificial Sequence: Synthetic oligonucleotide
acacuccaggcccucgucauugc

SEQ ID NO: 2104 - RNA, 21 nt, Artificial Sequence
  Description of Artificial Sequence: Synthetic oligonucleotide
gacgagggccuggagugugug

SEQ ID NO: 2105 - RNA, 23 nt, Artificial Sequence
  Description of Artificial Sequence: Synthetic oligonucleotide
cacacacuccaggcccucgucau

SEQ ID NO: 2106 - RNA, 21 nt, Artificial Sequence
  Description of Artificial Sequence: Synthetic oligonucleotide
gugugcccacugaggagucca

SEQ ID NO: 2107 - RNA, 23 nt, Artificial Sequence
  Description of Artificial Sequence: Synthetic oligonucleotide
uggacuccucagugggcacacac

SEQ ID NO: 2108 - RNA, 21 nt, Artificial Sequence
  Description of Artificial Sequence: Synthetic oligonucleotide
gugcccacugaggaguccaac

SEQ ID NO: 2109 - RNA, 23 nt, Artificial Sequence
  Description of Artificial Sequence: Synthetic oligonucleotide
guuggacuccucagugggcacac

SEQ ID NO: 2110 - RNA, 21 nt, Artificial Sequence
  Description of Artificial Sequence: Synthetic oligonucleotide
gcccacugaggaguccaacau

SEQ ID NO: 2111 - RNA, 23 nt, Artificial Sequence
  Description of Artificial Sequence: Synthetic oligonucleotide
auguuggacuccucagugggcac

SEQ ID NO: 2112 - DNA, 21 bp, Artificial Sequence
  Description of Artificial Sequence: Synthetic oligonucleotide
  Description of Combined DNA/RNA Molecule: Synthetic oligonucleotide
ugaggaguccaacaucacctt

SEQ ID NO: 2113 - DNA, 21 bp, Artificial Sequence
  Description of Artificial Sequence: Synthetic oligonucleotide
  Description of Combined DNA/RNA Molecule: Synthetic oligonucleotide
ggugauguuggacuccucatt

SEQ ID NO: 2114 - RNA, 21 nt, Artificial Sequence
  Description of Artificial Sequence: Synthetic oligonucleotide
aucaccaugcagauuaugcgg

SEQ ID NO: 2115 - RNA, 23 nt, Artificial Sequence
  Description of Artificial Sequence: Synthetic oligonucleotide
ccgcauaaucugcauggugaugu

SEQ ID NO: 2116 - DNA, 21 bp, Artificial Sequence
  Description of Artificial Sequence: Synthetic oligonucleotide
  Description of Combined DNA/RNA Molecule: Synthetic oligonucleotide
accaugcagauuaugcggatt

SEQ ID NO: 2117 - DNA, 21 bp, Artificial Sequence
  Description of Artificial Sequence: Synthetic oligonucleotide
  Description of Combined DNA/RNA Molecule: Synthetic oligonucleotide
uccgcauaaucugcauggutt

SEQ ID NO: 2118 - RNA, 21 nt, Artificial Sequence
  Description of Artificial Sequence: Synthetic oligonucleotide
gcagauuaugcggaucaaacc

SEQ ID NO: 2119 - RNA, 23 nt, Artificial Sequence
  Description of Artificial Sequence: Synthetic oligonucleotide
gguuugauccgcauaaucugcau

SEQ ID NO: 2120 - RNA, 21 nt, Artificial Sequence
  Description of Artificial Sequence: Synthetic oligonucleotide
agauuaugcggaucaaaccuc

SEQ ID NO: 2121 - RNA, 23 nt, Artificial Sequence
  Description of Artificial Sequence: Synthetic oligonucleotide
gagguuugauccgcauaaucugc

SEQ ID NO: 2122 - DNA, 21 bp, Artificial Sequence
  Description of Artificial Sequence: Synthetic oligonucleotide
  Description of Combined DNA/RNA Molecule: Synthetic oligonucleotide
uuaugcggaucaaaccucatt

SEQ ID NO: 2123 - DNA, 21 bp, Artificial Sequence
  Description of Artificial Sequence: Synthetic oligonucleotide
  Description of Combined DNA/RNA Molecule: Synthetic oligonucleotide
ugagguuugauccgcauaatt

SEQ ID NO: 2124 - DNA, 21 bp, Artificial Sequence
  Description of Artificial Sequence: Synthetic oligonucleotide
  Description of Combined DNA/RNA Molecule: Synthetic oligonucleotide
uaugcggaucaaaccucactt

SEQ ID NO: 2125 - DNA, 21 bp, Artificial Sequence
  Description of Artificial Sequence: Synthetic oligonucleotide
  Description of Combined DNA/RNA Molecule: Synthetic oligonucleotide
gugagguuugauccgcauatt

SEQ ID NO: 2126 - DNA, 21 bp, Artificial Sequence
  Description of Artificial Sequence: Synthetic oligonucleotide
  Description of Combined DNA/RNA Molecule: Synthetic oligonucleotide
augcggaucaaaccucacctt

SEQ ID NO: 2127 - DNA, 21 bp, Artificial Sequence
  Description of Artificial Sequence: Synthetic oligonucleotide
  Description of Combined DNA/RNA Molecule: Synthetic oligonucleotide
ggugagguuugauccgcautt

SEQ ID NO: 2128 - RNA, 21 nt, Artificial Sequence
  Description of Artificial Sequence: Synthetic oligonucleotide
gcggaucaaaccucaccaagg

SEQ ID NO: 2129 - RNA, 23 nt, Artificial Sequence
  Description of Artificial Sequence: Synthetic oligonucleotide
ccuuggugagguuugauccgcau

SEQ ID NO: 2130 - RNA, 19 nt, Artificial Sequence
  Description of Artificial Sequence: Synthetic oligonucleotide
gcggaucaaaccucaccaa

SEQ ID NO: 2131 - RNA, 19 nt, Artificial Sequence
  Description of Artificial Sequence: Synthetic oligonucleotide
uuggugagguuugauccgc

SEQ ID NO: 2132 - DNA, 21 bp, Artificial Sequence
  Description of Artificial Sequence: Synthetic oligonucleotide
  Description of Combined DNA/RNA Molecule: Synthetic oligonucleotide
gcggaucaaaccucaccaatt

SEQ ID NO: 2133 - DNA, 21 bp, Artificial Sequence
  Description of Artificial Sequence: Synthetic oligonucleotide
  Description of Combined DNA/RNA Molecule: Synthetic oligonucleotide
uuggugagguuugauccgctt

SEQ ID NO: 2134 - RNA, 19 nt, Artificial Sequence
  Description of Artificial Sequence: Synthetic oligonucleotide
gcggaucaaaccucaccaa

SEQ ID NO: 2135 - RNA, 19 nt, Artificial Sequence
  Description of Artificial Sequence: Synthetic oligonucleotide
uuggugagguuugauccgc

SEQ ID NO: 2136 - RNA, 21 nt, Artificial Sequence
  Description of Artificial Sequence: Synthetic oligonucleotide
ggaucaaaccucaccaaggcc

SEQ ID NO: 2137 - RNA, 23 nt, Artificial Sequence
  Description of Artificial Sequence: Synthetic oligonucleotide
ggccuuggugagguuugauccgc

SEQ ID NO: 2138 - RNA, 21 nt, Artificial Sequence
  Description of Artificial Sequence: Synthetic oligonucleotide
cagcacauaggagagaugagc

SEQ ID NO: 2139 - RNA, 23 nt, Artificial Sequence
  Description of Artificial Sequence: Synthetic oligonucleotide
gcucaucucuccuaugugcuggc

SEQ ID NO: 2140 - DNA, 21 bp, Artificial Sequence
  Description of Artificial Sequence: Synthetic oligonucleotide
  Description of Combined DNA/RNA Molecule: Synthetic oligonucleotide
cagcacauaggagagaugatt

SEQ ID NO: 2141 - DNA, 21 bp, Artificial Sequence
  Description of Artificial Sequence: Synthetic oligonucleotide
  Description of Combined DNA/RNA Molecule: Synthetic oligonucleotide
ucaucucuccuaugugcugtt

SEQ ID NO: 2142 - RNA, 21 nt, Artificial Sequence
  Description of Artificial Sequence: Synthetic oligonucleotide
agcacauaggagagaugagcu

SEQ ID NO: 2143 - RNA, 23 nt, Artificial Sequence
  Description of Artificial Sequence: Synthetic oligonucleotide
agcucaucucuccuaugugcugg

SEQ ID NO: 2144 - DNA, 21 bp, Artificial Sequence
  Description of Artificial Sequence: Synthetic oligonucleotide
  Description of Combined DNA/RNA Molecule: Synthetic oligonucleotide
agcacauaggagagaugagtt

SEQ ID NO: 2145 - DNA, 21 bp, Artificial Sequence
  Description of Artificial Sequence: Synthetic oligonucleotide
  Description of Combined DNA/RNA Molecule: Synthetic oligonucleotide
cucaucucuccuaugugcutt

SEQ ID NO: 2146 - RNA, 21 nt, Artificial Sequence
  Description of Artificial Sequence: Synthetic oligonucleotide
gcacauaggagagaugagcuu

SEQ ID NO: 2147 - RNA, 23 nt, Artificial Sequence
  Description of Artificial Sequence: Synthetic oligonucleotide
aagcucaucucuccuaugugcug

SEQ ID NO: 2148 - RNA, 21 nt, Artificial Sequence
  Description of Artificial Sequence: Synthetic oligonucleotide
gcacauaggagagaugagcuu

SEQ ID NO: 2149 - RNA, 21 nt, Artificial Sequence
  Description of Artificial Sequence: Synthetic oligonucleotide
aagcucaucucuccuaugugc

SEQ ID NO: 2150 - DNA, 21 bp, Artificial Sequence
  Description of Artificial Sequence: Synthetic oligonucleotide
  Description of Combined DNA/RNA Molecule: Synthetic oligonucleotide
gcacauaggagagaugagctt

SEQ ID NO: 2151 - DNA, 21 bp, Artificial Sequence
  Description of Artificial Sequence: Synthetic oligonucleotide
  Description of Combined DNA/RNA Molecule: Synthetic oligonucleotide
gcucaucucuccuaugugctt

SEQ ID NO: 2152 - RNA, 19 nt, Artificial Sequence
  Description of Artificial Sequence: Synthetic oligonucleotide
gcacauaggagagaugagc

SEQ ID NO: 2153 - RNA, 19 nt, Artificial Sequence
  Description of Artificial Sequence: Synthetic oligonucleotide
gcucaucucuccuaugugc

SEQ ID NO: 2154 - RNA, 21 nt, Artificial Sequence
  Description of Artificial Sequence: Synthetic oligonucleotide
cacauaggagagaugagcuuc

SEQ ID NO: 2155 - RNA, 23 nt, Artificial Sequence
  Description of Artificial Sequence: Synthetic oligonucleotide
gaagcucaucucuccuaugugcu

SEQ ID NO: 2156 - DNA, 21 bp, Artificial Sequence
  Description of Artificial Sequence: Synthetic oligonucleotide
  Description of Combined DNA/RNA Molecule: Synthetic oligonucleotide
cacauaggagagaugagcutt

SEQ ID NO: 2157 - DNA, 21 bp, Artificial Sequence
  Description of Artificial Sequence: Synthetic oligonucleotide
  Description of Combined DNA/RNA Molecule: Synthetic oligonucleotide
agcucaucucuccuaugugtt

SEQ ID NO: 2158 - RNA, 21 nt, Artificial Sequence
  Description of Artificial Sequence: Synthetic oligonucleotide
cauaggagagaugagcuuccu

SEQ ID NO: 2159 - RNA, 23 nt, Artificial Sequence
  Description of Artificial Sequence: Synthetic oligonucleotide
aggaagcucaucucuccuaugug

SEQ ID NO: 2160 - DNA, 21 bp, Artificial Sequence
  Description of Artificial Sequence: Synthetic oligonucleotide
  Description of Combined DNA/RNA Molecule: Synthetic oligonucleotide
cauaggagagaugagcuuctt

SEQ ID NO: 2161 - DNA, 21 bp, Artificial Sequence
  Description of Artificial Sequence: Synthetic oligonucleotide
  Description of Combined DNA/RNA Molecule: Synthetic oligonucleotide
gaagcucaucucuccuaugtt

SEQ ID NO: 2162 - RNA, 21 nt, Artificial Sequence
  Description of Artificial Sequence: Synthetic oligonucleotide
aggagagaugagcuuccuaca

SEQ ID NO: 2163 - RNA, 23 nt, Artificial Sequence
  Description of Artificial Sequence: Synthetic oligonucleotide
uguaggaagcucaucucuccuau

SEQ ID NO: 2164 - RNA, 21 nt, Artificial Sequence
  Description of Artificial Sequence: Synthetic oligonucleotide
agcacaacaaaugugaaugca

SEQ ID NO: 2165 - RNA, 23 nt, Artificial Sequence
  Description of Artificial Sequence: Synthetic oligonucleotide
ugcauucacauuuguugugcugu

SEQ ID NO: 2166 - RNA, 21 nt, Artificial Sequence
  Description of Artificial Sequence: Synthetic oligonucleotide
acaacaaaugugaaugcagac

SEQ ID NO: 2167 - RNA, 23 nt, Artificial Sequence
  Description of Artificial Sequence: Synthetic oligonucleotide
gucugcauucacauuuguugugc

SEQ ID NO: 2168 - DNA, 21 bp, Artificial Sequence
  Description of Artificial Sequence: Synthetic oligonucleotide
  Description of Combined DNA/RNA Molecule: Synthetic oligonucleotide
augugaaugcagaccaaagtt

SEQ ID NO: 2169 - DNA, 21 bp, Artificial Sequence
  Description of Artificial Sequence: Synthetic oligonucleotide
  Description of Combined DNA/RNA Molecule: Synthetic oligonucleotide
cuuuggucugcauucacautt

SEQ ID NO: 2170 - DNA, 21 bp, Artificial Sequence
  Description of Artificial Sequence: Synthetic oligonucleotide
  Description of Combined DNA/RNA Molecule: Synthetic oligonucleotide
ugugaaugcagaccaaagatt

SEQ ID NO: 2171 - DNA, 21 bp, Artificial Sequence
  Description of Artificial Sequence: Synthetic oligonucleotide
  Description of Combined DNA/RNA Molecule: Synthetic oligonucleotide
ucuuuggucugcauucacatt

SEQ ID NO: 2172 - RNA, 21 nt, Artificial Sequence
  Description of Artificial Sequence: Synthetic oligonucleotide
gugaaugcagaccaaagaaag

SEQ ID NO: 2173 - RNA, 23 nt, Artificial Sequence
  Description of Artificial Sequence: Synthetic oligonucleotide
cuuucuuuggucugcauucacau

SEQ ID NO: 2174 - RNA, 21 nt, Artificial Sequence
  Description of Artificial Sequence: Synthetic oligonucleotide
gugaaugcagaccaaagaaag

SEQ ID NO: 2175 - RNA, 21 nt, Artificial Sequence
  Description of Artificial Sequence: Synthetic oligonucleotide
cuuucuuuggucugcauucac

SEQ ID NO: 2176 - DNA, 21 bp, Artificial Sequence
  Description of Artificial Sequence: Synthetic oligonucleotide
  Description of Combined DNA/RNA Molecule: Synthetic oligonucleotide
gugaaugcagaccaaagaatt

SEQ ID NO: 2177 - DNA, 21 bp, Artificial Sequence
  Description of Artificial Sequence: Synthetic oligonucleotide
  Description of Combined DNA/RNA Molecule: Synthetic oligonucleotide
uucuuuggucugcauucactt

SEQ ID NO: 2178 - RNA, 19 nt, Artificial Sequence
  Description of Artificial Sequence: Synthetic oligonucleotide
gugaaugcagaccaaagaa

SEQ ID NO: 2179 - RNA, 19 nt, Artificial Sequence
  Description of Artificial Sequence: Synthetic oligonucleotide
uucuuuggucugcauucac

SEQ ID NO: 2180 - RNA, 21 nt, Artificial Sequence
  Description of Artificial Sequence: Synthetic oligonucleotide
gaaugcagaccaaagaaagau

SEQ ID NO: 2181 - RNA, 23 nt, Artificial Sequence
  Description of Artificial Sequence: Synthetic oligonucleotide
aucuuucuuuggucugcauucac

SEQ ID NO: 2182 - DNA, 21 bp, Artificial Sequence
  Description of Artificial Sequence: Synthetic oligonucleotide
  Description of Combined DNA/RNA Molecule: Synthetic oligonucleotide
gaaugcagaccaaagaaagtt

SEQ ID NO: 2183 - DNA, 21 bp, Artificial Sequence
  Description of Artificial Sequence: Synthetic oligonucleotide
  Description of Combined DNA/RNA Molecule: Synthetic oligonucleotide
cuuucuuuggucugcauuctt

SEQ ID NO: 2184 - RNA, 23 nt, Artificial Sequence
  Description of Artificial Sequence: Synthetic oligonucleotide
augaacuuucugcugucuugggu

SEQ ID NO: 2185 - RNA, 23 nt, Artificial Sequence
  Description of Artificial Sequence: Synthetic oligonucleotide
gugcauuggagccuugccuugcu

SEQ ID NO: 2186 - RNA, 23 nt, Artificial Sequence
  Description of Artificial Sequence: Synthetic oligonucleotide
ucuaccuccaccaugccaagugg

SEQ ID NO: 2187 - RNA, 23 nt, Artificial Sequence
  Description of Artificial Sequence: Synthetic oligonucleotide
cuaccuccaccaugccaaguggu

SEQ ID NO: 2188 - RNA, 23 nt, Artificial Sequence
  Description of Artificial Sequence: Synthetic oligonucleotide
accuccaccaugccaaguggucc

SEQ ID NO: 2189 - RNA, 23 nt, Artificial Sequence
  Description of Artificial Sequence: Synthetic oligonucleotide
ccuccaccaugccaagugguccc

SEQ ID NO: 2190 - RNA, 23 nt, Artificial Sequence
  Description of Artificial Sequence: Synthetic oligonucleotide
cuccaccaugccaagugguccca

SEQ ID NO: 2191 - RNA, 23 nt, Artificial Sequence
  Description of Artificial Sequence: Synthetic oligonucleotide
uccaccaugccaaguggucccag

SEQ ID NO: 2192 - RNA, 23 nt, Artificial Sequence
  Description of Artificial Sequence: Synthetic oligonucleotide
ccaccaugccaaguggucccagg

SEQ ID NO: 2193 - RNA, 23 nt, Artificial Sequence
  Description of Artificial Sequence: Synthetic oligonucleotide
caccaugccaaguggucccaggc

SEQ ID NO: 2194 - RNA, 23 nt, Artificial Sequence
  Description of Artificial Sequence: Synthetic oligonucleotide
accaugccaaguggucccaggcu

SEQ ID NO: 2195 - RNA, 23 nt, Artificial Sequence
  Description of Artificial Sequence: Synthetic oligonucleotide
ccaugccaaguggucccaggcug

SEQ ID NO: 2196 - RNA, 23 nt, Artificial Sequence
  Description of Artificial Sequence: Synthetic oligonucleotide
caugccaaguggucccaggcugc

SEQ ID NO: 2197 - RNA, 23 nt, Artificial Sequence
  Description of Artificial Sequence: Synthetic oligonucleotide
augccaaguggucccaggcugca

SEQ ID NO: 2198 - RNA, 23 nt, Artificial Sequence
  Description of Artificial Sequence: Synthetic oligonucleotide
ugccaaguggucccaggcugcac

SEQ ID NO: 2199 - RNA, 23 nt, Artificial Sequence
  Description of Artificial Sequence: Synthetic oligonucleotide
gccaaguggucccaggcugcacc

SEQ ID NO: 2200 - RNA, 23 nt, Artificial Sequence
  Description of Artificial Sequence: Synthetic oligonucleotide
ccaaguggucccaggcugcaccc

SEQ ID NO: 2201 - RNA, 23 nt, Artificial Sequence
  Description of Artificial Sequence: Synthetic oligonucleotide
caaguggucccaggcugcaccca

SEQ ID NO: 2202 - RNA, 23 nt, Artificial Sequence
  Description of Artificial Sequence: Synthetic oligonucleotide
aaguggucccaggcugcacccau

SEQ ID NO: 2203 - RNA, 23 nt, Artificial Sequence
  Description of Artificial Sequence: Synthetic oligonucleotide
agggcagaaucaucacgaagugg

SEQ ID NO: 2204 - RNA, 23 nt, Artificial Sequence
  Description of Artificial Sequence: Synthetic oligonucleotide
gggcagaaucaucacgaaguggu

SEQ ID NO: 2205 - RNA, 23 nt, Artificial Sequence
  Description of Artificial Sequence: Synthetic oligonucleotide
ggcagaaucaucacgaaguggug

SEQ ID NO: 2206 - RNA, 23 nt, Artificial Sequence
  Description of Artificial Sequence: Synthetic oligonucleotide
gcagaaucaucacgaagugguga

SEQ ID NO: 2207 - RNA, 23 nt, Artificial Sequence
  Description of Artificial Sequence: Synthetic oligonucleotide
cagaaucaucacgaaguggugaa

SEQ ID NO: 2208 - RNA, 23 nt, Artificial Sequence
  Description of Artificial Sequence: Synthetic oligonucleotide
agaaucaucacgaaguggugaag

SEQ ID NO: 2209 - RNA, 23 nt, Artificial Sequence
  Description of Artificial Sequence: Synthetic oligonucleotide
gaaucaucacgaaguggugaagu

SEQ ID NO: 2210 - RNA, 23 nt, Artificial Sequence
  Description of Artificial Sequence: Synthetic oligonucleotide
acgaaguggugaaguucauggau

SEQ ID NO: 2211 - RNA, 23 nt, Artificial Sequence
  Description of Artificial Sequence: Synthetic oligonucleotide
gugaaguucauggaugucuauca

SEQ ID NO: 2212 - RNA, 23 nt, Artificial Sequence
  Description of Artificial Sequence: Synthetic oligonucleotide
cauggaugucuaucagcgcagcu

SEQ ID NO: 2213 - RNA, 23 nt, Artificial Sequence
  Description of Artificial Sequence: Synthetic oligonucleotide
auggaugucuaucagcgcagcua

SEQ ID NO: 2214 - RNA, 23 nt, Artificial Sequence
  Description of Artificial Sequence: Synthetic oligonucleotide
uggaugucuaucagcgcagcuac

SEQ ID NO: 2215 - RNA, 23 nt, Artificial Sequence
  Description of Artificial Sequence: Synthetic oligonucleotide
ggaugucuaucagcgcagcuacu

SEQ ID NO: 2216 - RNA, 23 nt, Artificial Sequence
  Description of Artificial Sequence: Synthetic oligonucleotide
gaugucuaucagcgcagcuacug

SEQ ID NO: 2217 - RNA, 23 nt, Artificial Sequence
  Description of Artificial Sequence: Synthetic oligonucleotide
augucuaucagcgcagcuacugc

SEQ ID NO: 2218 - RNA, 23 nt, Artificial Sequence
  Description of Artificial Sequence: Synthetic oligonucleotide
ugucuaucagcgcagcuacugcc

SEQ ID NO: 2219 - RNA, 23 nt, Artificial Sequence
  Description of Artificial Sequence: Synthetic oligonucleotide
gcgcagcuacugccauccaaucg

SEQ ID NO: 2220 - RNA, 23 nt, Artificial Sequence
  Description of Artificial Sequence: Synthetic oligonucleotide
gcagcuacugccauccaaucgag

SEQ ID NO: 2221 - RNA, 23 nt, Artificial Sequence
  Description of Artificial Sequence: Synthetic oligonucleotide
gcuacugccauccaaucgagacc

SEQ ID NO: 2222 - RNA, 23 nt, Artificial Sequence
  Description of Artificial Sequence: Synthetic oligonucleotide
cuacugccauccaaucgagaccc

SEQ ID NO: 2223 - RNA, 23 nt, Artificial Sequence
  Description of Artificial Sequence: Synthetic oligonucleotide
uacugccauccaaucgagacccu

SEQ ID NO: 2224 - RNA, 23 nt, Artificial Sequence
  Description of Artificial Sequence: Synthetic oligonucleotide
acugccauccaaucgagacccug

SEQ ID NO: 2225 - RNA, 23 nt, Artificial Sequence
  Description of Artificial Sequence: Synthetic oligonucleotide
gagacccugguggacaucuucca

SEQ ID NO: 2226 - RNA, 23 nt, Artificial Sequence
  Description of Artificial Sequence: Synthetic oligonucleotide
agacccugguggacaucuuccag

SEQ ID NO: 2227 - RNA, 23 nt, Artificial Sequence
  Description of Artificial Sequence: Synthetic oligonucleotide
gacccugguggacaucuuccagg

SEQ ID NO: 2228 - RNA, 23 nt, Artificial Sequence
  Description of Artificial Sequence: Synthetic oligonucleotide
acccugguggacaucuuccagga

SEQ ID NO: 2229 - RNA, 23 nt, Artificial Sequence
  Description of Artificial Sequence: Synthetic oligonucleotide
cccugguggacaucuuccaggag

SEQ ID NO: 2230 - RNA, 23 nt, Artificial Sequence
  Description of Artificial Sequence: Synthetic oligonucleotide
ccugguggacaucuuccaggagu

SEQ ID NO: 2231 - RNA, 23 nt, Artificial Sequence
  Description of Artificial Sequence: Synthetic oligonucleotide
cugguggacaucuuccaggagua

SEQ ID NO: 2232 - RNA, 23 nt, Artificial Sequence
  Description of Artificial Sequence: Synthetic oligonucleotide
guggacaucuuccaggaguaccc

SEQ ID NO: 2233 - RNA, 23 nt, Artificial Sequence
  Description of Artificial Sequence: Synthetic oligonucleotide
acaucuuccaggaguacccugau

SEQ ID NO: 2234 - RNA, 23 nt, Artificial Sequence
  Description of Artificial Sequence: Synthetic oligonucleotide
aguacccugaugagaucgaguac

SEQ ID NO: 2235 - RNA, 23 nt, Artificial Sequence
  Description of Artificial Sequence: Synthetic oligonucleotide
guacccugaugagaucgaguaca

SEQ ID NO: 2236 - RNA, 23 nt, Artificial Sequence
  Description of Artificial Sequence: Synthetic oligonucleotide
aguacaucuucaagccauccugu

SEQ ID NO: 2237 - RNA, 23 nt, Artificial Sequence
  Description of Artificial Sequence: Synthetic oligonucleotide
gcaaugacgagggccuggagugu

SEQ ID NO: 2238 - RNA, 23 nt, Artificial Sequence
  Description of Artificial Sequence: Synthetic oligonucleotide
augacgagggccuggagugugug

SEQ ID NO: 2239 - RNA, 23 nt, Artificial Sequence
  Description of Artificial Sequence: Synthetic oligonucleotide
gugugugcccacugaggagucca

SEQ ID NO: 2240 - RNA, 23 nt, Artificial Sequence
  Description of Artificial Sequence: Synthetic oligonucleotide
gugugcccacugaggaguccaac

SEQ ID NO: 2241 - RNA, 23 nt, Artificial Sequence
  Description of Artificial Sequence: Synthetic oligonucleotide
gugcccacugaggaguccaacau

SEQ ID NO: 2242 - RNA, 23 nt, Artificial Sequence
  Description of Artificial Sequence: Synthetic oligonucleotide
acugaggaguccaacaucaccau

SEQ ID NO: 2243 - RNA, 23 nt, Artificial Sequence
  Description of Artificial Sequence: Synthetic oligonucleotide
acaucaccaugcagauuaugcgg

SEQ ID NO: 2244 - RNA, 23 nt, Artificial Sequence
  Description of Artificial Sequence: Synthetic oligonucleotide
ucaccaugcagauuaugcggauc

SEQ ID NO: 2245 - RNA, 23 nt, Artificial Sequence
  Description of Artificial Sequence: Synthetic oligonucleotide
augcagauuaugcggaucaaacc

SEQ ID NO: 2246 - RNA, 23 nt, Artificial Sequence
  Description of Artificial Sequence: Synthetic oligonucleotide
gcagauuaugcggaucaaaccuc

SEQ ID NO: 2247 - RNA, 23 nt, Artificial Sequence
  Description of Artificial Sequence: Synthetic oligonucleotide
gauuaugcggaucaaaccucacc

SEQ ID NO: 2248 - RNA, 23 nt, Artificial Sequence
  Description of Artificial Sequence: Synthetic oligonucleotide
auuaugcggaucaaaccucacca

SEQ ID NO: 2249 - RNA, 23 nt, Artificial Sequence
  Description of Artificial Sequence: Synthetic oligonucleotide
uuaugcggaucaaaccucaccaa

SEQ ID NO: 2250 - RNA, 23 nt, Artificial Sequence
  Description of Artificial Sequence: Synthetic oligonucleotide
augcggaucaaaccucaccaagg

SEQ ID NO: 2251 - RNA, 23 nt, Artificial Sequence
  Description of Artificial Sequence: Synthetic oligonucleotide
gcggaucaaaccucaccaaggcc

SEQ ID NO: 2252 - RNA, 23 nt, Artificial Sequence
  Description of Artificial Sequence: Synthetic oligonucleotide
gccagcacauaggagagaugagc

SEQ ID NO: 2253 - RNA, 23 nt, Artificial Sequence
  Description of Artificial Sequence: Synthetic oligonucleotide
ccagcacauaggagagaugagcu

SEQ ID NO: 2254 - RNA, 23 nt, Artificial Sequence
  Description of Artificial Sequence: Synthetic oligonucleotide
cagcacauaggagagaugagcuu

SEQ ID NO: 2255 - RNA, 23 nt, Artificial Sequence
  Description of Artificial Sequence: Synthetic oligonucleotide
agcacauaggagagaugagcuuc

SEQ ID NO: 2256 - RNA, 23 nt, Artificial Sequence
  Description of Artificial Sequence: Synthetic oligonucleotide
cacauaggagagaugagcuuccu

SEQ ID NO: 2257 - RNA, 23 nt, Artificial Sequence
  Description of Artificial Sequence: Synthetic oligonucleotide
auaggagagaugagcuuccuaca

SEQ ID NO: 2258 - RNA, 23 nt, Artificial Sequence
  Description of Artificial Sequence: Synthetic oligonucleotide
acagcacaacaaaugugaaugca

SEQ ID NO: 2259 - RNA, 23 nt, Artificial Sequence
  Description of Artificial Sequence: Synthetic oligonucleotide
gcacaacaaaugugaaugcagac

SEQ ID NO: 2260 - RNA, 23 nt, Artificial Sequence
  Description of Artificial Sequence: Synthetic oligonucleotide
aaaugugaaugcagaccaaagaa

SEQ ID NO: 2261 - RNA, 23 nt, Artificial Sequence
  Description of Artificial Sequence: Synthetic oligonucleotide
aaugugaaugcagaccaaagaaa

SEQ ID NO: 2262 - RNA, 23 nt, Artificial Sequence
  Description of Artificial Sequence: Synthetic oligonucleotide
augugaaugcagaccaaagaaag

SEQ ID NO: 2263 - RNA, 23 nt, Artificial Sequence
  Description of Artificial Sequence: Synthetic oligonucleotide
gugaaugcagaccaaagaaagau

SEQ ID NO: 2264 - RNA, 19 nt, Artificial Sequence
  Description of Artificial Sequence: Synthetic oligonucleotide
accaaggccagcacauagg

SEQ ID NO: 2265 - RNA, 19 nt, Artificial Sequence
  Description of Artificial Sequence: Synthetic oligonucleotide
ccaaggccagcacauagga

SEQ ID NO: 2266 - RNA, 19 nt, Artificial Sequence
  Description of Artificial Sequence: Synthetic oligonucleotide
ccaaggccagcacauagga

SEQ ID NO: 2267 - RNA, 19 nt, Artificial Sequence
  Description of Artificial Sequence: Synthetic oligonucleotide
aaggccagcacauaggaga

SEQ ID NO: 2268 - RNA, 19 nt, Artificial Sequence
  Description of Artificial Sequence: Synthetic oligonucleotide
aggccagcacauaggagag

SEQ ID NO: 2269 - RNA, 19 nt, Artificial Sequence
  Description of Artificial Sequence: Synthetic oligonucleotide
ggccagcacauaggagaga

SEQ ID NO: 2270 - RNA, 19 nt, Artificial Sequence
  Description of Artificial Sequence: Synthetic oligonucleotide
gccagcacauaggagagau

SEQ ID NO: 2271 - RNA, 19 nt, Artificial Sequence
  Description of Artificial Sequence: Synthetic oligonucleotide
ccagcacauaggagagaug

SEQ ID NO: 2272 - RNA, 19 nt, Artificial Sequence
  Description of Artificial Sequence: Synthetic oligonucleotide
cagcacauaggagagauga

SEQ ID NO: 2273 - RNA, 19 nt, Artificial Sequence
  Description of Artificial Sequence: Synthetic oligonucleotide
agcacauaggagagaugag

SEQ ID NO: 2274 - RNA, 19 nt, Artificial Sequence
  Description of Artificial Sequence: Synthetic oligonucleotide
cacauaggagagaugagcu

SEQ ID NO: 2275 - RNA, 19 nt, Artificial Sequence
  Description of Artificial Sequence: Synthetic oligonucleotide
acauaggagagaugagcuu

SEQ ID NO: 2276 - RNA, 19 nt, Artificial Sequence
  Description of Artificial Sequence: Synthetic oligonucleotide
cauaggagagaugagcuuc

SEQ ID NO: 2277 - RNA, 19 nt, Artificial Sequence
  Description of Artificial Sequence: Synthetic oligonucleotide
auaggagagaugagcuucc

SEQ ID NO: 2278 - RNA, 19 nt, Artificial Sequence
  Description of Artificial Sequence: Synthetic oligonucleotide
uaggagagaugagcuuccu

SEQ ID NO: 2279 - RNA, 19 nt, Artificial Sequence
  Description of Artificial Sequence: Synthetic oligonucleotide
aggagagaugagcuuccua

SEQ ID NO: 2280 - RNA, 19 nt, Artificial Sequence
  Description of Artificial Sequence: Synthetic oligonucleotide
ggagagaugagcuuccuac

SEQ ID NO: 2281 - RNA, 19 nt, Artificial Sequence
  Description of Artificial Sequence: Synthetic oligonucleotide
gagagaugagcuuccuaca

SEQ ID NO: 2282 - RNA, 19 nt, Artificial Sequence
  Description of Artificial Sequence: Synthetic oligonucleotide
agagaugagcuuccuacag

SEQ ID NO: 2283 - RNA, 19 nt, Artificial Sequence
  Description of Artificial Sequence: Synthetic oligonucleotide
gagaugagcuuccuacagc

SEQ ID NO: 2284 - RNA, 19 nt, Artificial Sequence
  Description of Artificial Sequence: Synthetic oligonucleotide
auguuccuuaucgagaauc

SEQ ID NO: 2285 - RNA, 19 nt, Artificial Sequence
  Description of Artificial Sequence: Synthetic oligonucleotide
uguuccuuaucgagaaucu

SEQ ID NO: 2286 - RNA, 19 nt, Artificial Sequence
  Description of Artificial Sequence: Synthetic oligonucleotide
guuccuuaucgagaaucua

SEQ ID NO: 2287 - RNA, 19 nt, Artificial Sequence
  Description of Artificial Sequence: Synthetic oligonucleotide
uuccuuaucgagaaucuaa

SEQ ID NO: 2288 - RNA, 19 nt, Artificial Sequence
  Description of Artificial Sequence: Synthetic oligonucleotide
uccuuaucgagaaucuaaa

SEQ ID NO: 2289 - RNA, 19 nt, Artificial Sequence
  Description of Artificial Sequence: Synthetic oligonucleotide
ccuuaucgagaaucuaaac

SEQ ID NO: 2290 - RNA, 19 nt, Artificial Sequence
  Description of Artificial Sequence: Synthetic oligonucleotide
cuuaucgagaaucuaaacu

SEQ ID NO: 2291 - RNA, 19 nt, Artificial Sequence
  Description of Artificial Sequence: Synthetic oligonucleotide
uuaucgagaaucuaaacua

SEQ ID NO: 2292 - RNA, 19 nt, Artificial Sequence
  Description of Artificial Sequence: Synthetic oligonucleotide
uaucgagaaucuaaacuaa

SEQ ID NO: 2293 - RNA, 19 nt, Artificial Sequence
  Description of Artificial Sequence: Synthetic oligonucleotide
aucgagaaucuaaacuaac

SEQ ID NO: 2294 - RNA, 19 nt, Artificial Sequence
  Description of Artificial Sequence: Synthetic oligonucleotide
cgagaaucuaaacuaacua

SEQ ID NO: 2295 - RNA, 19 nt, Artificial Sequence
  Description of Artificial Sequence: Synthetic oligonucleotide
gagaaucuaaacuaacuag

SEQ ID NO: 2296 - RNA, 19 nt, Artificial Sequence
  Description of Artificial Sequence: Synthetic oligonucleotide
agaaucuaaacuaacuaga

SEQ ID NO: 2297 - RNA, 19 nt, Artificial Sequence
  Description of Artificial Sequence: Synthetic oligonucleotide
gaaucuaaacuaacuagaa

SEQ ID NO: 2298 - RNA, 19 nt, Artificial Sequence
  Description of Artificial Sequence: Synthetic oligonucleotide
aaucuaaacuaacuagaau

SEQ ID NO: 2299 - RNA, 19 nt, Artificial Sequence
  Description of Artificial Sequence: Synthetic oligonucleotide
aucuaaacuaacuagaauc

SEQ ID NO: 2300 - RNA, 19 nt, Artificial Sequence
  Description of Artificial Sequence: Synthetic oligonucleotide
ucuaaacuaacuagaaucc

SEQ ID NO: 2301 - RNA, 19 nt, Artificial Sequence
  Description of Artificial Sequence: Synthetic oligonucleotide
cuaaacuaacuagaauccu

SEQ ID NO: 2302 - RNA, 19 nt, Artificial Sequence
  Description of Artificial Sequence: Synthetic oligonucleotide
uaaacuaacuagaauccuc

SEQ ID NO: 2303 - RNA, 19 nt, Artificial Sequence
  Description of Artificial Sequence: Synthetic oligonucleotide
aaacuaacuagaauccucc

SEQ ID NO: 2304 - DNA, 21 bp, Artificial Sequence
  Description of Artificial Sequence: Synthetic oligonucleotide
  Description of Combined DNA/RNA Molecule: Synthetic oligonucleotide
accaaggccagcacauaggtt

SEQ ID NO: 2305 - DNA, 21 bp, Artificial Sequence
  Description of Artificial Sequence: Synthetic oligonucleotide
  Description of Combined DNA/RNA Molecule: Synthetic oligonucleotide
ccuaugugcuggccuuggutt

SEQ ID NO: 2306 - DNA, 21 bp, Artificial Sequence
  Description of Artificial Sequence: Synthetic oligonucleotide
  Description of Combined DNA/RNA Molecule: Synthetic oligonucleotide
ccaaggccagcacauaggatt

SEQ ID NO: 2307 - DNA, 21 bp, Artificial Sequence
  Description of Artificial Sequence: Synthetic oligonucleotide
  Description of Combined DNA/RNA Molecule: Synthetic oligonucleotide
uccuaugugcuggccuuggtt

SEQ ID NO: 2308 - DNA, 21 bp, Artificial Sequence
  Description of Artificial Sequence: Synthetic oligonucleotide
  Description of Combined DNA/RNA Molecule: Synthetic oligonucleotide
ccaaggccagcacauaggatt

SEQ ID NO: 2309 - DNA, 21 bp, Artificial Sequence
  Description of Artificial Sequence: Synthetic oligonucleotide
  Description of Combined DNA/RNA Molecule: Synthetic oligonucleotide
cuccuaugugcuggccuugtt

SEQ ID NO: 2310 - DNA, 21 bp, Artificial Sequence
  Description of Artificial Sequence: Synthetic oligonucleotide
  Description of Combined DNA/RNA Molecule: Synthetic oligonucleotide
aaggccagcacauaggagatt

SEQ ID NO: 2311 - DNA, 21 bp, Artificial Sequence
  Description of Artificial Sequence: Synthetic oligonucleotide
  Description of Combined DNA/RNA Molecule: Synthetic oligonucleotide
ucuccuaugugcuggccuutt

SEQ ID NO: 2312 - DNA, 21 bp, Artificial Sequence
  Description of Artificial Sequence: Synthetic oligonucleotide
  Description of Combined DNA/RNA Molecule: Synthetic oligonucleotide
aggccagcacauaggagagtt

SEQ ID NO: 2313 - DNA, 21 bp, Artificial Sequence
  Description of Artificial Sequence: Synthetic oligonucleotide
  Description of Combined DNA/RNA Molecule: Synthetic oligonucleotide
cucuccuaugugcuggccutt

SEQ ID NO: 2314 - DNA, 21 bp, Artificial Sequence
  Description of Artificial Sequence: Synthetic oligonucleotide
  Description of Combined DNA/RNA Molecule: Synthetic oligonucleotide
ggccagcacauaggagagatt

SEQ ID NO: 2315 - DNA, 21 bp, Artificial Sequence
  Description of Artificial Sequence: Synthetic oligonucleotide
  Description of Combined DNA/RNA Molecule: Synthetic oligonucleotide
ucucuccuaugugcuggcctt

SEQ ID NO: 2316 - DNA, 21 bp, Artificial Sequence
  Description of Artificial Sequence: Synthetic oligonucleotide
  Description of Combined DNA/RNA Molecule: Synthetic oligonucleotide
gccagcacauaggagagautt

SEQ ID NO: 2317 - DNA, 21 bp, Artificial Sequence
  Description of Artificial Sequence: Synthetic oligonucleotide
  Description of Combined DNA/RNA Molecule: Synthetic oligonucleotide
aucucuccuaugugcuggctt

SEQ ID NO: 2318 - DNA, 21 bp, Artificial Sequence
  Description of Artificial Sequence: Synthetic oligonucleotide
  Description of Combined DNA/RNA Molecule: Synthetic oligonucleotide
ccagcacauaggagagaugtt

SEQ ID NO: 2319 - DNA, 21 bp, Artificial Sequence
  Description of Artificial Sequence: Synthetic oligonucleotide
  Description of Combined DNA/RNA Molecule: Synthetic oligonucleotide
caucucuccuaugugcuggtt

SEQ ID NO: 2320 - DNA, 21 bp, Artificial Sequence
  Description of Artificial Sequence: Synthetic oligonucleotide
  Description of Combined DNA/RNA Molecule: Synthetic oligonucleotide
cagcacauaggagagaugatt

SEQ ID NO: 2321 - DNA, 21 bp, Artificial Sequence
  Description of Artificial Sequence: Synthetic oligonucleotide
  Description of Combined DNA/RNA Molecule: Synthetic oligonucleotide
ucaucucuccuaugugcugtt

SEQ ID NO: 2322 - DNA, 21 bp, Artificial Sequence
  Description of Artificial Sequence: Synthetic oligonucleotide
  Description of Combined DNA/RNA Molecule: Synthetic oligonucleotide
agcacauaggagagaugagtt

SEQ ID NO: 2323 - DNA, 21 bp, Artificial Sequence
  Description of Artificial Sequence: Synthetic oligonucleotide
  Description of Combined DNA/RNA Molecule: Synthetic oligonucleotide
cucaucucuccuaugugcutt

SEQ ID NO: 2324 - DNA, 21 bp, Artificial Sequence
  Description of Artificial Sequence: Synthetic oligonucleotide
  Description of Combined DNA/RNA Molecule: Synthetic oligonucleotide
cacauaggagagaugagcutt

SEQ ID NO: 2325 - DNA, 21 bp, Artificial Sequence
  Description of Artificial Sequence: Synthetic oligonucleotide
  Description of Combined DNA/RNA Molecule: Synthetic oligonucleotide
agcucaucucuccuaugugtt

SEQ ID NO: 2326 - DNA, 21 bp, Artificial Sequence
  Description of Artificial Sequence: Synthetic oligonucleotide
  Description of Combined DNA/RNA Molecule: Synthetic oligonucleotide
acauaggagagaugagcuutt

SEQ ID NO: 2327 - DNA, 21 bp, Artificial Sequence
  Description of Artificial Sequence: Synthetic oligonucleotide
  Description of Combined DNA/RNA Molecule: Synthetic oligonucleotide
aagcucaucucuccuaugutt

SEQ ID NO: 2328 - DNA, 21 bp, Artificial Sequence
  Description of Artificial Sequence: Synthetic oligonucleotide
  Description of Combined DNA/RNA Molecule: Synthetic oligonucleotide
cauaggagagaugagcuuctt

SEQ ID NO: 2329 - DNA, 21 bp, Artificial Sequence
  Description of Artificial Sequence: Synthetic oligonucleotide
  Description of Combined DNA/RNA Molecule: Synthetic oligonucleotide
gaagcucaucucuccuaugtt

SEQ ID NO: 2330 - DNA, 21 bp, Artificial Sequence
  Description of Artificial Sequence: Synthetic oligonucleotide
  Description of Combined DNA/RNA Molecule: Synthetic oligonucleotide
auaggagagaugagcuucctt

SEQ ID NO: 2331 - DNA, 21 bp, Artificial Sequence
  Description of Artificial Sequence: Synthetic oligonucleotide
  Description of Combined DNA/RNA Molecule: Synthetic oligonucleotide
ggaagcucaucucuccuautt

SEQ ID NO: 2332 - DNA, 21 bp, Artificial Sequence
  Description of Artificial Sequence: Synthetic oligonucleotide
  Description of Combined DNA/RNA Molecule: Synthetic oligonucleotide
uaggagagaugagcuuccutt

SEQ ID NO: 2333 - DNA, 21 bp, Artificial Sequence
  Description of Artificial Sequence: Synthetic oligonucleotide
  Description of Combined DNA/RNA Molecule: Synthetic oligonucleotide
aggaagcucaucucuccuatt

SEQ ID NO: 2334 - DNA, 21 bp, Artificial Sequence
  Description of Artificial Sequence: Synthetic oligonucleotide
  Description of Combined DNA/RNA Molecule: Synthetic oligonucleotide
aggagagaugagcuuccuatt

SEQ ID NO: 2335 - DNA, 21 bp, Artificial Sequence
  Description of Artificial Sequence: Synthetic oligonucleotide
  Description of Combined DNA/RNA Molecule: Synthetic oligonucleotide
uaggaagcucaucucuccutt

SEQ ID NO: 2336 - DNA, 21 bp, Artificial Sequence
  Description of Artificial Sequence: Synthetic oligonucleotide
  Description of Combined DNA/RNA Molecule: Synthetic oligonucleotide
ggagagaugagcuuccuactt

SEQ ID NO: 2337 - DNA, 21 bp, Artificial Sequence
  Description of Artificial Sequence: Synthetic oligonucleotide
  Description of Combined DNA/RNA Molecule: Synthetic oligonucleotide
guaggaagcucaucucucctt

SEQ ID NO: 2338 - DNA, 21 bp, Artificial Sequence
  Description of Artificial Sequence: Synthetic oligonucleotide
  Description of Combined DNA/RNA Molecule: Synthetic oligonucleotide
gagagaugagcuuccuacatt

SEQ ID NO: 2339 - DNA, 21 bp, Artificial Sequence
  Description of Artificial Sequence: Synthetic oligonucleotide
  Description of Combined DNA/RNA Molecule: Synthetic oligonucleotide
uguaggaagcucaucucuctt

SEQ ID NO: 2340 - DNA, 21 bp, Artificial Sequence
  Description of Artificial Sequence: Synthetic oligonucleotide
  Description of Combined DNA/RNA Molecule: Synthetic oligonucleotide
agagaugagcuuccuacagtt

SEQ ID NO: 2341 - DNA, 21 bp, Artificial Sequence
  Description of Artificial Sequence: Synthetic oligonucleotide
  Description of Combined DNA/RNA Molecule: Synthetic oligonucleotide
cuguaggaagcucaucucutt

SEQ ID NO: 2342 - DNA, 21 bp, Artificial Sequence
  Description of Artificial Sequence: Synthetic oligonucleotide
  Description of Combined DNA/RNA Molecule: Synthetic oligonucleotide
gagaugagcuuccuacagctt

SEQ ID NO: 2343 - DNA, 21 bp, Artificial Sequence
  Description of Artificial Sequence: Synthetic oligonucleotide
  Description of Combined DNA/RNA Molecule: Synthetic oligonucleotide
gcuguaggaagcucaucuctt

SEQ ID NO: 2344 - DNA, 21 bp, Artificial Sequence
  Description of Artificial Sequence: Synthetic oligonucleotide
  Description of Combined DNA/RNA Molecule: Synthetic oligonucleotide
auguuccuuaucgagaauctt

SEQ ID NO: 2345 - DNA, 21 bp, Artificial Sequence
  Description of Artificial Sequence: Synthetic oligonucleotide
  Description of Combined DNA/RNA Molecule: Synthetic oligonucleotide
gauucucgauaaggaacautt

SEQ ID NO: 2346 - DNA, 21 bp, Artificial Sequence
  Description of Artificial Sequence: Synthetic oligonucleotide
  Description of Combined DNA/RNA Molecule: Synthetic oligonucleotide
uguuccuuaucgagaaucutt

SEQ ID NO: 2347 - DNA, 21 bp, Artificial Sequence
  Description of Artificial Sequence: Synthetic oligonucleotide
  Description of Combined DNA/RNA Molecule: Synthetic oligonucleotide
agauucucgauaaggaacatt

SEQ ID NO: 2348 - DNA, 21 bp, Artificial Sequence
  Description of Artificial Sequence: Synthetic oligonucleotide
  Description of Combined DNA/RNA Molecule: Synthetic oligonucleotide
guuccuuaucgagaaucuatt

SEQ ID NO: 2349 - DNA, 21 bp, Artificial Sequence
  Description of Artificial Sequence: Synthetic oligonucleotide
  Description of Combined DNA/RNA Molecule: Synthetic oligonucleotide
uagauucucgauaaggaactt

SEQ ID NO: 2350 - DNA, 21 bp, Artificial Sequence
  Description of Artificial Sequence: Synthetic oligonucleotide
  Description of Combined DNA/RNA Molecule: Synthetic oligonucleotide
uuccuuaucgagaaucuaatt

SEQ ID NO: 2351 - DNA, 21 bp, Artificial Sequence
  Description of Artificial Sequence: Synthetic oligonucleotide
  Description of Combined DNA/RNA Molecule: Synthetic oligonucleotide
uuagauucucgauaaggaatt

SEQ ID NO: 2352 - DNA, 21 bp, Artificial Sequence
  Description of Artificial Sequence: Synthetic oligonucleotide
  Description of Combined DNA/RNA Molecule: Synthetic oligonucleotide
uccuuaucgagaaucuaaatt

SEQ ID NO: 2353 - DNA, 21 bp, Artificial Sequence
  Description of Artificial Sequence: Synthetic oligonucleotide
  Description of Combined DNA/RNA Molecule: Synthetic oligonucleotide
uuuagauucucgauaaggatt

SEQ ID NO: 2354 - DNA, 21 bp, Artificial Sequence
  Description of Artificial Sequence: Synthetic oligonucleotide
  Description of Combined DNA/RNA Molecule: Synthetic oligonucleotide
ccuuaucgagaaucuaaactt

SEQ ID NO: 2355 - DNA, 21 bp, Artificial Sequence
  Description of Artificial Sequence: Synthetic oligonucleotide
  Description of Combined DNA/RNA Molecule: Synthetic oligonucleotide
guuuagauucucgauaaggtt

SEQ ID NO: 2356 - DNA, 21 bp, Artificial Sequence
  Description of Artificial Sequence: Synthetic oligonucleotide
  Description of Combined DNA/RNA Molecule: Synthetic oligonucleotide
cuuaucgagaaucuaaacutt

SEQ ID NO: 2357 - DNA, 21 bp, Artificial Sequence
  Description of Artificial Sequence: Synthetic oligonucleotide
  Description of Combined DNA/RNA Molecule: Synthetic oligonucleotide
aguuuagauucucgauaagtt

SEQ ID NO: 2358 - DNA, 21 bp, Artificial Sequence
  Description of Artificial Sequence: Synthetic oligonucleotide
  Description of Combined DNA/RNA Molecule: Synthetic oligonucleotide
uuaucgagaaucuaaacuatt

SEQ ID NO: 2359 - DNA, 21 bp, Artificial Sequence
  Description of Artificial Sequence: Synthetic oligonucleotide
  Description of Combined DNA/RNA Molecule: Synthetic oligonucleotide
uaguuuagauucucgauaatt

SEQ ID NO: 2360 - DNA, 21 bp, Artificial Sequence
  Description of Artificial Sequence: Synthetic oligonucleotide
  Description of Combined DNA/RNA Molecule: Synthetic oligonucleotide
uaucgagaaucuaaacuaatt

SEQ ID NO: 2361 - DNA, 21 bp, Artificial Sequence
  Description of Artificial Sequence: Synthetic oligonucleotide
  Description of Combined DNA/RNA Molecule: Synthetic oligonucleotide
uuaguuuagauucucgauatt

SEQ ID NO: 2362 - DNA, 21 bp, Artificial Sequence
  Description of Artificial Sequence: Synthetic oligonucleotide
  Description of Combined DNA/RNA Molecule: Synthetic oligonucleotide
aucgagaaucuaaacuaactt

SEQ ID NO: 2363 - DNA, 21 bp, Artificial Sequence
  Description of Artificial Sequence: Synthetic oligonucleotide
  Description of Combined DNA/RNA Molecule: Synthetic oligonucleotide
guuaguuuagauucucgautt

SEQ ID NO: 2364 - DNA, 21 bp, Artificial Sequence
  Description of Artificial Sequence: Synthetic oligonucleotide
  Description of Combined DNA/RNA Molecule: Synthetic oligonucleotide
cgagaaucuaaacuaacuatt

SEQ ID NO: 2365 - DNA, 21 bp, Artificial Sequence
  Description of Artificial Sequence: Synthetic oligonucleotide
  Description of Combined DNA/RNA Molecule: Synthetic oligonucleotide
uaguuaguuuagauucucgtt

SEQ ID NO: 2366 - DNA, 21 bp, Artificial Sequence
  Description of Artificial Sequence: Synthetic oligonucleotide
  Description of Combined DNA/RNA Molecule: Synthetic oligonucleotide
gagaaucuaaacuaacuagtt

SEQ ID NO: 2367 - DNA, 21 bp, Artificial Sequence
  Description of Artificial Sequence: Synthetic oligonucleotide
  Description of Combined DNA/RNA Molecule: Synthetic oligonucleotide
cuaguuaguuuagauucuctt

SEQ ID NO: 2368 - DNA, 21 bp, Artificial Sequence
  Description of Artificial Sequence: Synthetic oligonucleotide
  Description of Combined DNA/RNA Molecule: Synthetic oligonucleotide
agaaucuaaacuaacuagatt

SEQ ID NO: 2369 - DNA, 21 bp, Artificial Sequence
  Description of Artificial Sequence: Synthetic oligonucleotide
  Description of Combined DNA/RNA Molecule: Synthetic oligonucleotide
ucuaguuaguuuagauucutt

SEQ ID NO: 2370 - DNA, 21 bp, Artificial Sequence
  Description of Artificial Sequence: Synthetic oligonucleotide
  Description of Combined DNA/RNA Molecule: Synthetic oligonucleotide
gaaucuaaacuaacuagaatt

SEQ ID NO: 2371 - DNA, 21 bp, Artificial Sequence
  Description of Artificial Sequence: Synthetic oligonucleotide
  Description of Combined DNA/RNA Molecule: Synthetic oligonucleotide
uucuaguuaguuuagauuctt

SEQ ID NO: 2372 - DNA, 21 bp, Artificial Sequence
  Description of Artificial Sequence: Synthetic oligonucleotide
  Description of Combined DNA/RNA Molecule: Synthetic oligonucleotide
aaucuaaacuaacuagaautt

SEQ ID NO: 2373 - DNA, 21 bp, Artificial Sequence
  Description of Artificial Sequence: Synthetic oligonucleotide
  Description of Combined DNA/RNA Molecule: Synthetic oligonucleotide
auucuaguuaguuuagauutt

SEQ ID NO: 2374 - DNA, 21 bp, Artificial Sequence
  Description of Artificial Sequence: Synthetic oligonucleotide
  Description of Combined DNA/RNA Molecule: Synthetic oligonucleotide
aucuaaacuaacuagaauctt

SEQ ID NO: 2375 - DNA, 21 bp, Artificial Sequence
  Description of Artificial Sequence: Synthetic oligonucleotide
  Description of Combined DNA/RNA Molecule: Synthetic oligonucleotide
gauucuaguuaguuuagautt

SEQ ID NO: 2376 - DNA, 21 bp, Artificial Sequence
  Description of Artificial Sequence: Synthetic oligonucleotide
  Description of Combined DNA/RNA Molecule: Synthetic oligonucleotide
ucuaaacuaacuagaaucctt

SEQ ID NO: 2377 - DNA, 21 bp, Artificial Sequence
  Description of Artificial Sequence: Synthetic oligonucleotide
  Description of Combined DNA/RNA Molecule: Synthetic oligonucleotide
ggauucuaguuaguuuagatt

SEQ ID NO: 2378 - DNA, 21 bp, Artificial Sequence
  Description of Artificial Sequence: Synthetic oligonucleotide
  Description of Combined DNA/RNA Molecule: Synthetic oligonucleotide
cuaaacuaacuagaauccutt

SEQ ID NO: 2379 - DNA, 21 bp, Artificial Sequence
  Description of Artificial Sequence: Synthetic oligonucleotide
  Description of Combined DNA/RNA Molecule: Synthetic oligonucleotide
aggauucuaguuaguuuagtt

SEQ ID NO: 2380 - DNA, 21 bp, Artificial Sequence
  Description of Artificial Sequence: Synthetic oligonucleotide
  Description of Combined DNA/RNA Molecule: Synthetic oligonucleotide
uaaacuaacuagaauccuctt

SEQ ID NO: 2381 - DNA, 21 bp, Artificial Sequence
  Description of Artificial Sequence: Synthetic oligonucleotide
  Description of Combined DNA/RNA Molecule: Synthetic oligonucleotide
gaggauucuaguuaguuuatt

SEQ ID NO: 2382 - DNA, 21 bp, Artificial Sequence
  Description of Artificial Sequence: Synthetic oligonucleotide
  Description of Combined DNA/RNA Molecule: Synthetic oligonucleotide
aaacuaacuagaauccucctt

SEQ ID NO: 2383 - DNA, 21 bp, Artificial Sequence
  Description of Artificial Sequence: Synthetic oligonucleotide
  Description of Combined DNA/RNA Molecule: Synthetic oligonucleotide
ggaggauucuaguuaguuutt

SEQ ID NO: 2384 - RNA, 19 nt, Artificial Sequence
  Description of Artificial Sequence: Synthetic oligonucleotide
accaaggccagcacauagg

SEQ ID NO: 2385 - RNA, 19 nt, Artificial Sequence
  Description of Artificial Sequence: Synthetic oligonucleotide
ccaaggccagcacauagga

SEQ ID NO: 2386 - RNA, 19 nt, Artificial Sequence
  Description of Artificial Sequence: Synthetic oligonucleotide
caaggccagcacauaggag

SEQ ID NO: 2387 - RNA, 19 nt, Artificial Sequence
  Description of Artificial Sequence: Synthetic oligonucleotide
aaggccagcacauaggaga

SEQ ID NO: 2388 - RNA, 19 nt, Artificial Sequence
  Description of Artificial Sequence: Synthetic oligonucleotide
aggccagcacauaggagag

SEQ ID NO: 2389 - RNA, 19 nt, Artificial Sequence
  Description of Artificial Sequence: Synthetic oligonucleotide
ggccagcacauaggagaga

SEQ ID NO: 2390 - RNA, 19 nt, Artificial Sequence
  Description of Artificial Sequence: Synthetic oligonucleotide
gccagcacauaggagagau

SEQ ID NO: 2391 - RNA, 19 nt, Artificial Sequence
  Description of Artificial Sequence: Synthetic oligonucleotide
ccagcacauaggagagaug

SEQ ID NO: 2392 - RNA, 19 nt, Artificial Sequence
  Description of Artificial Sequence: Synthetic oligonucleotide
cagcacauaggagagauga

SEQ ID NO: 2393 - RNA, 19 nt, Artificial Sequence
  Description of Artificial Sequence: Synthetic oligonucleotide
agcacauaggagagaugag

SEQ ID NO: 2394 - RNA, 19 nt, Artificial Sequence
  Description of Artificial Sequence: Synthetic oligonucleotide
cacauaggagagaugagcu

SEQ ID NO: 2395 - RNA, 19 nt, Artificial Sequence
  Description of Artificial Sequence: Synthetic oligonucleotide
acauaggagagaugagcuu

SEQ ID NO: 2396 - RNA, 19 nt, Artificial Sequence
  Description of Artificial Sequence: Synthetic oligonucleotide
cauaggagagaugagcuuc

SEQ ID NO: 2397 - RNA, 19 nt, Artificial Sequence
  Description of Artificial Sequence: Synthetic oligonucleotide
auaggagagaugagcuucc

SEQ ID NO: 2398 - RNA, 19 nt, Artificial Sequence
  Description of Artificial Sequence: Synthetic oligonucleotide
uaggagagaugagcuuccu

SEQ ID NO: 2399 - RNA, 19 nt, Artificial Sequence
  Description of Artificial Sequence: Synthetic oligonucleotide
aggagagaugagcuuccua

SEQ ID NO: 2400 - RNA, 19 nt, Artificial Sequence
  Description of Artificial Sequence: Synthetic oligonucleotide
ggagagaugagcuuccuac

SEQ ID NO: 2401 - RNA, 19 nt, Artificial Sequence
  Description of Artificial Sequence: Synthetic oligonucleotide
gagagaugagcuuccuaca

SEQ ID NO: 2402 - RNA, 19 nt, Artificial Sequence
  Description of Artificial Sequence: Synthetic oligonucleotide
agagaugagcuuccuacag

SEQ ID NO: 2403 - RNA, 19 nt, Artificial Sequence
  Description of Artificial Sequence: Synthetic oligonucleotide
gagaugagcuuccuacagc

SEQ ID NO: 2404 - RNA, 21 nt, Artificial Sequence
  Description of Artificial Sequence: Synthetic oligonucleotide
accaaggccagcacauaggag

SEQ ID NO: 2405 - RNA, 21 nt, Artificial Sequence
  Description of Artificial Sequence: Synthetic oligonucleotide
ccaaggccagcacauaggaga

SEQ ID NO: 2406 - RNA, 21 nt, Artificial Sequence
  Description of Artificial Sequence: Synthetic oligonucleotide
caaggccagcacauaggagag

SEQ ID NO: 2407 - RNA, 21 nt, Artificial Sequence
  Description of Artificial Sequence: Synthetic oligonucleotide
aaggccagcacauaggagaga

SEQ ID NO: 2408 - RNA, 21 nt, Artificial Sequence
  Description of Artificial Sequence: Synthetic oligonucleotide
aggccagcacauaggagagau

SEQ ID NO: 2409 - RNA, 21 nt, Artificial Sequence
  Description of Artificial Sequence: Synthetic oligonucleotide
ggccagcacauaggagagaug

SEQ ID NO: 2410 - RNA, 21 nt, Artificial Sequence
  Description of Artificial Sequence: Synthetic oligonucleotide
gccagcacauaggagagauga

SEQ ID NO: 2411 - RNA, 21 nt, Artificial Sequence
  Description of Artificial Sequence: Synthetic oligonucleotide
ccagcacauaggagagaugag

SEQ ID NO: 2412 - RNA, 21 nt, Artificial Sequence
  Description of Artificial Sequence: Synthetic oligonucleotide
cagcacauaggagagaugagc

SEQ ID NO: 2413 - RNA, 21 nt, Artificial Sequence
  Description of Artificial Sequence: Synthetic oligonucleotide
agcacauaggagagaugagcu

SEQ ID NO: 2414 - RNA, 21 nt, Artificial Sequence
  Description of Artificial Sequence: Synthetic oligonucleotide
cacauaggagagaugagcuuc

SEQ ID NO: 2415 - RNA, 21 nt, Artificial Sequence
  Description of Artificial Sequence: Synthetic oligonucleotide
acauaggagagaugagcuucc

SEQ ID NO: 2416 - RNA, 21 nt, Artificial Sequence
  Description of Artificial Sequence: Synthetic oligonucleotide
cauaggagagaugagcuuccu

SEQ ID NO: 2417 - RNA, 21 nt, Artificial Sequence
  Description of Artificial Sequence: Synthetic oligonucleotide
auaggagagaugagcuuccua

SEQ ID NO: 2418 - RNA, 21 nt, Artificial Sequence
  Description of Artificial Sequence: Synthetic oligonucleotide
uaggagagaugagcuuccuac

SEQ ID NO: 2419 - RNA, 21 nt, Artificial Sequence
  Description of Artificial Sequence: Synthetic oligonucleotide
aggagagaugagcuuccuaca

SEQ ID NO: 2420 - RNA, 21 nt, Artificial Sequence
  Description of Artificial Sequence: Synthetic oligonucleotide
ggagagaugagcuuccuacag

SEQ ID NO: 2421 - RNA, 21 nt, Artificial Sequence
  Description of Artificial Sequence: Synthetic oligonucleotide
gagagaugagcuuccuacagc

SEQ ID NO: 2422 - RNA, 21 nt, Artificial Sequence
  Description of Artificial Sequence: Synthetic oligonucleotide
agagaugagcuuccuacagca

SEQ ID NO: 2423 - RNA, 21 nt, Artificial Sequence
  Description of Artificial Sequence: Synthetic oligonucleotide
gagaugagcuuccuacagcac

SEQ ID NO: 2424 - RNA, 23 nt, Artificial Sequence
  Description of Artificial Sequence: Synthetic oligonucleotide
cuccuaugugcuggccuugguga

SEQ ID NO: 2425 - RNA, 23 nt, Artificial Sequence
  Description of Artificial Sequence: Synthetic oligonucleotide
ucuccuaugugcuggccuuggug

SEQ ID NO: 2426 - RNA, 23 nt, Artificial Sequence
  Description of Artificial Sequence: Synthetic oligonucleotide
cucuccuaugugcuggccuuggu

SEQ ID NO: 2427 - RNA, 23 nt, Artificial Sequence
  Description of Artificial Sequence: Synthetic oligonucleotide
ucucuccuaugugcuggccuugg

SEQ ID NO: 2428 - RNA, 23 nt, Artificial Sequence
  Description of Artificial Sequence: Synthetic oligonucleotide
aucucuccuaugugcuggccuug

SEQ ID NO: 2429 - RNA, 23 nt, Artificial Sequence
  Description of Artificial Sequence: Synthetic oligonucleotide
caucucuccuaugugcuggccuu

SEQ ID NO: 2430 - RNA, 23 nt, Artificial Sequence
  Description of Artificial Sequence: Synthetic oligonucleotide
ucaucucuccuaugugcuggccu

SEQ ID NO: 2431 - RNA, 23 nt, Artificial Sequence
  Description of Artificial Sequence: Synthetic oligonucleotide
cucaucucuccuaugugcuggcc

SEQ ID NO: 2432 - RNA, 23 nt, Artificial Sequence
  Description of Artificial Sequence: Synthetic oligonucleotide
gcucaucucuccuaugugcuggc

SEQ ID NO: 2433 - RNA, 23 nt, Artificial Sequence
  Description of Artificial Sequence: Synthetic oligonucleotide
agcucaucucuccuaugugcugg

SEQ ID NO: 2434 - RNA, 23 nt, Artificial Sequence
  Description of Artificial Sequence: Synthetic oligonucleotide
gaagcucaucucuccuaugugcu

SEQ ID NO: 2435 - RNA, 23 nt, Artificial Sequence
  Description of Artificial Sequence: Synthetic oligonucleotide
ggaagcucaucucuccuaugugc

SEQ ID NO: 2436 - RNA, 23 nt, Artificial Sequence
  Description of Artificial Sequence: Synthetic oligonucleotide
aggaagcucaucucuccuaugug

SEQ ID NO: 2437 - RNA, 23 nt, Artificial Sequence
  Description of Artificial Sequence: Synthetic oligonucleotide
uaggaagcucaucucuccuaugu

SEQ ID NO: 2438 - RNA, 23 nt, Artificial Sequence
  Description of Artificial Sequence: Synthetic oligonucleotide
guaggaagcucaucucuccuaug

SEQ ID NO: 2439 - RNA, 23 nt, Artificial Sequence
  Description of Artificial Sequence: Synthetic oligonucleotide
uguaggaagcucaucucuccuau

SEQ ID NO: 2440 - RNA, 23 nt, Artificial Sequence
  Description of Artificial Sequence: Synthetic oligonucleotide
cuguaggaagcucaucucuccua

SEQ ID NO: 2441 - RNA, 23 nt, Artificial Sequence
  Description of Artificial Sequence: Synthetic oligonucleotide
gcuguaggaagcucaucucuccu

SEQ ID NO: 2442 - RNA, 23 nt, Artificial Sequence
  Description of Artificial Sequence: Synthetic oligonucleotide
ugcuguaggaagcucaucucucc

SEQ ID NO: 2443 - RNA, 23 nt, Artificial Sequence
  Description of Artificial Sequence: Synthetic oligonucleotide
gugcuguaggaagcucaucucuc
